(19) United States
(12) Patent Application Publication
(10) Pub. No.: US 2015/0038357 A1
(43) Pub. Date: Feb. 5, 2015

(54) PROGNOSIS FOR GLIOMA

(71) Applicants: UNIVERSITE MONTPELLIER 2 SCIENCES ET TECHNIQUES, Montpellier Cedex (FR); INSTITUT CURIE, Paris (FR); INSERM, Paris (FR); CENTER HOSPITALIER UNIVERSITAIRE DE MONTPELLIER, Montpellier Cedex 5 (FR); CENTER NATIONAL DE LA RECHERCHE SCIENTIFIQUE, Paris Cedex 16 (FR); UNIVERSITYE MONTPELLIER 1, Montpellier Cedex 2 (FR)

(72) Inventors: Dominique Joubert, Sete (FR); Luc Bauchet, Clapiers (FR); Jean-Philippe Hugnot, Montpellier (FR); Ivan Bieche, Suresnes (FR); Rosette Lidereau, Gennevilliers (FR); Thierry Reme, Sainte Croix De Quintillargues (FR); Hugues Duffau, Montpellier (FR); Valerie Rigau, Mauguio (FR)

(21) Appl. No.: 14/350,086

(22) PCT Filed: Oct. 1, 2012
(86) PCT No.: PCT/EP2012/069387

§ 371 Date: Apr. 7, 2014

Related U.S. Application Data
(60) Provisional application No. 61/544,353, filed on Oct. 7, 2011.

(30) Foreign Application Priority Data
Oct. 7, 2011 (EP) 11306307.7

(51) Int. Cl. C12Q 1/68; G06F 19/00; G06F 19/20

(52) U.S. Cl. CPC C12Q 1/6886; G06F 19/20; G06F 19/3431; C12Q 2600/118; C12Q 2600/158
USPC 506/9; 506/16; 702/19

(57) ABSTRACT

Disclosed is a method of determining the survival prognosis of a patient afflicted by a glioma. The method includes assessing the level of expression of one or more specific gene in cells of the glioma.

### TECHNICAL FIELD

[0001] The present invention relates generally to methods and materials for use in providing a prognosis for patients afflicted by glioma.

### BACKGROUND ART

### Gliomas

[0002] Gliomas are tumors that originate from brain or spinal cord, in particular from glial cells or their progenitors. No underlying cause has been identified for the majority of gliomas. The only established risk factor is exposure to ionizing radiation. Just few percents of patients with gliomas have a family history of gliomas. Some of these familial cases are associated with rare genetic syndromes, such as neurofibromatosis types 1 and 2, the Li-Fraumeni syndrome (germ-line p53 mutations associated with an increased risk of several cancers), and Turcot's syndrome (intestinal polyposis and brain tumors). However, most familial cases have no identified genetic cause.

[0003] The incidence rate of the overall category glioma was 6.04 per 100,000 person-years, in US, for years 2004 to 2007 (CBTRUS 2011, http://www.cbtrus.org/2011-NPCR-SEER/WEB-0407-Report-3-3-2011.pdf).

[0004] Symptoms of gliomas depend on which part of the central nervous system is affected. A brain glioma can cause seizures, headaches, nausea and vomiting (as a result of increased intracranial pressure), mental status disorders, sensory-motor deficits, etc. A glioma of the optic nerve can cause visual loss. Spinal cord gliomas can cause pain, weakness, numbness in the extremities, paraplegia, tetraplegia, etc. Gliomas do not metastasize by the bloodstream, but they can spread via the cerebrospinal fluid and cause “drop metastases” to the spinal cord.

[0005] A child who has a subacute disorder of the central nervous system that produces cranial nerve abnormalities, long-tract signs, unsteady gait, and some behavioral changes is most likely to have a brainstem glioma.

[0006] Treatment for brain gliomas depends on the location, the cell type and the grade of malignancy. Histological diagnosis is mandatory, except in rare cases where biopsy or surgical resection is too dangerous. Often, treatment is a combined approach, using surgery, radiation therapy, and chemotherapy. The choice of treatments depends mainly on the histological study including the grading of the tumor. But unfortunately, the histological grading remains partly subjective and not always reproducible. Therefore, it is essential to define most relevant biological criteria to better adapt the treatments.

### Classification and Treatment of Gliomas

[0007] Conventionally, gliomas are classified by cell type, and by grade.

[0008] Gliomas are named according to the specific type of cell they share histological features with, but not necessarily originate from. The main types of gliomas are:
[0009] Astrocytomas—astrocytes (glioblastoma multiforme is the most common astrocytoma in adult and the most frequent malignant primitive brain tumor).
[0010] Oligodendrogliomas—oligodendrocytes.
[0011] Mixed gliomas, such as oligoastrocytomas, contain cells from different types of glia (astrocytes and oligodendrocytes).
[0012] Ependymomas—ependymal cells.

[0013] Gliomas are further categorized according to their grade, which is determined by pathologic evaluation of the tumor. Of numerous grading systems in use for gliomas, the most common is the World Health Organization (WHO) grading system, under which tumors are graded from I (least advanced disease—best prognosis) to IV (most advanced disease—worst prognosis). Ependymomas are specific kind of gliomas.

[0014] The classification (for astrocytomas, oligodendrogliomas and mixed tumors) is as follows:
[0015] Pilocytic astrocytoma is the most frequent grade I gliomas, mainly relevant to children and prognostis is very good when tumor could be totally resected.
[0016] Grade II gliomas are well-differentiated (not anaplastic) but not benign tumors.

[0017] They move inexorably toward anaplastic transformation, but the time to anaplastic transformation varies greatly from patient to patient. Survival varies also from patient to patient and the median overall survival is approximately 8 to 10 years.
[0018] Grade III gliomas are anaplastic. The prognosis is worse with an overall median survival of approximately 3 years.
[0019] Grade IV gliomas (Glioblastoma multiforme) are the most malignant primary central nervous system tumors with an overall survival of less than 1 year in population base-studies.

[0020] Moreover, gliomas are often subdivided or classified in low grade gliomas (grade I and II) and high gliomas (grade III and IV). As new treatments (surgery with functional and imaging techniques, conformational and new techniques for radiotherapy, new drugs for chemotherapy and targeted therapies, etc.) are now available, it is clearly demonstrated that treatments can influence the survival of glioma patients. In addition, treatments and oncological care for low grade glioma and high grade glioma pateints are very different.

[0021] So, it is important, to correctly determine the type of glioma that afflicts a subject, in order to both determine the prognosis, and to propose an adapted therapy.

[0022] Treatments for low grade glioma aim at avoiding the malignity increase as long as possible while preserving the patient's quality of life. However the management of patients with low grade glioma is a challenge as these tumors are clearly an heterogenous group with different evolution especially regarding the risk of anaplastic transformation occurring either rapidly or long after diagnosis. Indeed, these tumours will ineluctably degenerate toward anaplastic glioma within 5-10 years which then leads to the death of the patient rapidly. However approximately 10-20% of patients have a more rapid tumoral growth and transform to anaplasia more rapidly. This poses important dilemmas for defining the best therapeutic approach (exeresis with or without chemotherapy). There is currently no definitive criteria to classify a low grade lesion as at high risk or low risk to relapse and/or rapid progression. The neuropathological classification based on histology and immunohistochemistry data is unfortunately unreliable and there is a considerable level of discrepancy between neuropathologists for the same tumor sample (Prayson R A, J Neurol Sci, 2000, 175(1), 33-9). Clearly, the definition of novel biological criteria to implement the identification of high-risk patients that would need more aggressive adjuvant treatments would be a major breakthrough in the field.

### Background Art Relating to Methods for Diagnosis and Prognosis of Gliomas

[0023] The international application WO 2008/031165 discloses methods for the diagnosis and prognosis of tumours of the central nervous system, including of the brain, particularly tumours of neuroepithelial tissue (glioma(s)). In particular, WO/2008/031165 relates to a method comprising determining the expression of at least one gene selected from the group consisting of IQGAPI, Homer 1, and CIQLI or determining the expression of at least two genes selected from the group consisting of IQGAPI, Homer 1, IGFBP2, and CIQLI in a biological sample from an individual.

[0024] The international application WO 2008/067351 discloses a method for diagnosing the presence of a glioma tumor in a mammal, wherein the method comprises comparing the level of expression of PIK3R3 polypeptide or nucleic acid encoding a PIK3R3 polypeptide. This application discloses a method for diagnosing the severity of a glioma tumor in a mammal, wherein the method comprises: (a) contacting a test sample comprising cells from said glioma tumor or extracts of DNA, RNA, protein or other gene product(s) obtained from the mammal with a reagent that binds to the PIK3R3 polypeptide or nucleic acid encoding PIK3R3 polypeptide in the sample, (b) measuring the amount of complex formation between the reagent with the PIK3R3-encoding nucleic acid or PIK3R3 polypeptide in the test sample, wherein the formation of a high level of complex, relative to the level in known healthy sample of similar tissue origin, is indicative of an aggressive tumor.

[0025] The international application WO 2008/021483 discloses a method for diagnosing a disease state or a phenotype or predicting disease therapy outcome in a subject, said method comprising: a) obtaining a sample from a subject; b) screening for a simultaneous aberrant expression level of two or more markers in the same cell from the sample; c) scoring the expression level as being aberrant when the expression level detected is above or below a certain threshold coefficient; wherein the detection threshold coefficient is determined by comparing the expression levels of the samples obtained from the subjects to values in a reference database of sample phenotypes obtained from subjects with either a known diagnosis or known clinical outcome after therapy, wherein the presence of an aberrant expression level of two or more markers in individual cells and presence of cells aberrantly expressing two or more such markers is indicative of a disease diagnosis or prognosis for therapy failure in the subject.

[0026] The international application WO 2005/028617 discloses that an increase of the α4 chain-containing Laminin-8 correlates with poor prognosis for patients with brain gliomas.

[0027] Certain other genes described below have also been described in publications concerning glioma: CHI3L1 (Clin Cancer Res. 2005 May 1; 11(9):3326-34 & PLoS One. 2010 Sep. 3; 5(9):e12548); BIRC5 (J Clin Neurosci. 2008 November; 15(11):1198-203 Epub 2008 Oct. 5 & J. Clin Oncol. 2002 Feb. 15; 20(4):1063-8; VIM (Acta Neuropathol. 1998 May; 95(5):493-504); TNC (Cancer. 2003 Dec. 1; 98(11):2430); AURKA and DLL3 (PLoS One. 2010 Sep. 3; 5(9):e12548); and KI67 (Clin Neuropathol. 2002 November-December; 21(6):252-7, Pathol Res Pract. 2002; 198(4):261-5). Additionally BMP2 has been proposed as a serum marker for glioblastomas (J Neurooncol. 2011 March; 102(1):71-80.) and increased levels of BMP2 in grade 3-4 versus grade 1-2 gliomas has been reported (Xi Bao Yu Fen Zi Mian Yi Xue Za Zhi. 2009 July; 25(7):637-9.). BMP2 expression has also been shown to be increased in 1p19q codeletion gliomas (Mol Cancer. 2008 May 20; 7:41.) and implicated in differential survival between grade 3 gliomas and glioblastomas (Cancer Res. 2004, 64:6503-6510).

[0028] However, none of the above methods, or other methods belonging to the art, takes account of the possible miss-classification of tumors, and therefore the possibility to miss-prognose patient, or to provide to patients inappropriate therapy.

[0029] The purpose of the invention is to overcome these inconveniencies.

[0030] One aim of the invention is to provide a new efficient phenotypic or prognostic method of gliomas. Another aim of the invention is to provide compositions for carrying out the phenotypic or prognostic method. Another aim is to provide a kit for prognosing gliomas.

[0031] Other objects and aims are described herein. Furthermore it can be seen that the identification of genes, or sets of genes, the expression of which can be used in the classification or prognosis of gliomas and\or the devising of appropriate treatment strategies for gliomas, would provide a contribution to the art.

### DISCLOSURE OF THE INVENTION

[0032] The present inventors have identified genes and gene expression signatures which can be usefully employed in the classification or prognosis of gliomas and\or the devising of appropriate treatment strategies for gliomas. Such genes, or in some cases combinations of genes, have not previously been shown to have utility in diagnosing or prognosing glioma survival.

[0033] The phenotype can, if desired, be used to supplement other diagnostic or prognostic markers, or clinical assessment. A preferred phenotype is a predicted survival.

[0034] The relevant gene expression may also be used as a biomarker for choosing or monitoring specific therapeutic regimes and chemotherapeutic combinations.

[0035] Thus in one aspect the invention provides a method of predicting the survival prognosis of a patient afflicted by a glioma, the method comprising assessing the level of expression of a gene or genes of Table 10 in cells of the glioma.

[0036] In another aspect of the invention there is provided use of any one (or more) of the genes of Table 10 for determining a survival prognosis for a patient afflicted by a glioma:

TABLE 10

| SEQ ID | Gene name |
|---|---|
| SEQ ID NO: 3 | POSTN |
| SEQ ID NO: 4 | HSPG2 |
| SEQ ID NO: 6 | COL1A1 |
| SEQ ID NO: 7 | NEK2 |
| SEQ ID NO: 8 | DLG7 |
| SEQ ID NO: 9 | FOXM1 |
| SEQ ID NO: 11 | PLK1 |
| SEQ ID NO: 12 | NKX6-1 |
| SEQ ID NO: 13 | NRG3 |
| SEQ ID NO: 14 | BUB1B |
| SEQ ID NO: 18 | JAG1 |
| SEQ ID NO: 20 | EZH2 |
| SEQ ID NO: 21 | BUB1 |

[0037] Further information about these sequences is provided in the Tables and other disclosure below. As explained in detail hereinafter, the aspects and embodiments of the invention described and defined herein apply mutatis mutandis to variants of these genes also.

[0038] In general terms, and as described herein, underexpression of NRG3 may be associated with poor prognosis, while overexpression of the remaining genes in Table 10 may be associated with poor prognosis.

[0039] In one aspect the method may comprise the steps of obtaining a test sample comprising nucleic acid molecules from a sample of the glioma then determining the amount of the relevant mRNA in the test sample and optionally comparing that amount to a predetermined value.

[0040] As described in more detail below, levels of “expression” may be detected either from levels of nucleic acid or protein. For example protein may be detected in the cell membrane, the endoplasmic reticulum or the Golgi apparatus (by direct binding or by activity) or nucleic acid may be detected from mRNA encoding the relevant gene, either directly or indirectly (e.g. via cDNA derived therefrom). Put another way, the expression may be measured directly (e.g. using RT-PCT or microarrays) or indirectly (e.g. by proteomic analysis).

[0041] In one embodiment the method may comprise the steps of:

[0042] (a) contacting a sample of the glioma obtained from the patient with a binding agent that specifically binds to the encoded protein or relevant mRNA; and

[0043] (b) detecting the amount of protein or mRNA that binds to the binding agent,

[0044] (c) optionally comparing the amount of protein or mRNA to a predetermined cut-off value, and thereby making a determination about phenotype (e.g. prognosis)

[0045] As noted below, the sample will typically be the tumor itself.

[0046] In another aspect there is provided a method for determining a clinical phenotype (such as prognosis) for a patient afflicted by a glioma, which method comprises:

[0047] (i) assessing and preferably quantifying the expression level of one or more genes (e.g. a set of genes) in a sample from said patient,

[0048] (ii) comparing expression value or values obtained from step (i) with one or more reference expression values for each of said plurality of genes,

[0049] (iii) determining the clinical phenotype (e.g. prognosis) based on the comparison at (ii).

[0050] In this method the comparison at (ii) can provide a “gene signature” (e.g. based on aberrant expression of the genes).

[0051] The gene or genes may include any of those from Table 10, which genes have not previously been shown to have utility in diagnosing or prognosing glioma survival. In other embodiments of the invention described in more detail below, a plurality of genes may be selected from Table 1, which combination of genes has not previously been shown to have utility in diagnosing or prognosing glioma survival.

### Glioma

[0052] Preferably the glioma is a WHO grade 2 or grade 3 glioma.

[0053] Moreover, the Inventors have determined that the WHO classification in class 2 or 3 is not representative of the prognosis outcome, whereas the method according to the invention is representative of the prognosis outcome.

[0054] In the invention “WHO grade 2 or grade 3 glioma” corresponds to the World Health Organisation classification of glioma.

[0055] Biological sample according to the invention are commonly classified by histological techniques according to a common proceeding well known in the art.

### Biological Sample

[0056] “A biological sample of a subject afflicted by a WHO grade 2 or grade 3 glioma” corresponds to a sample originating from an individual afflicted by a grade 2 or grade 3 glioma, and is commonly essentially constituted by the tumor. This could be, for instance, a biopsy obtained after surgery. Biological samples according to the invention are commonly classified by histological techniques according to a common proceeding well known in the art.

Methods in which the Invention has Utility

[0057] By “method for determining the survival prognosis of said patient” or the like, it is meant in the invention that the method allows to predict the likely outcome of an illness, e.g. the outcome of grade 2 and grade 3 gliomas. More particularly, the prognosis method can evaluate the survival rate, said survival rate indicating the percentage of people, in a study, who are alive for a given period of time after diagnosis. This information allows the practitioner to determine if a medication is appropriated, and in the affirmative, what type of medication is more appropriate for the patient.

### Quantification of Genes

[0058] The measure of the expression utilised in the invention is a quantitative measure. In other words, for each gene, a value is obtained by techniques well known in the art.

[0059] In one preferred embodiment of the invention, the terms “determining the quantitative expression” of gene “I” means that the measure of the transcription product(s) of said gene, e.g. messenger RNA (mRNA), is evaluated, and quantified. In other words, in the invention, the amount of the transcript(s) of said gene is quantified. In other embodiments the expression can be determined indirectly based on derived nucleic acids, or polypeptide expression products.

[0060] Methods of determining quantitative expression are described in more detail hereinafter.

[0061] Thus in preferred embodiments described herein the quantitative value Qi, for a gene is therefore representative of the amount of molecule of mRNA, or the corresponding cDNA, expressed for said gene i in the biological sample of the patient.

[0062] “The quantitative value Qi, for a gene i” means, for instance, that for the gene 3 (i.e. gene SEQ ID NO: 3) the quantitative value measured will be Q3. This example applies mutatis mutandis for all the other genes of the group of 22 genes in Table 1, i.e Q1 for gene 1 (SEQ ID NO: 1), Q2 for gene 2 (SEQ ID NO: 2) . . . etc.

### Normalisation of Quantification of Genes

[0063] Generally speaking, the method used to measure the expression level of a gene i gives a “signal” representative of the raw amount of the gene i product in the biological sample. In order to correctly evaluate the real amount of said gene i product, the signal is compared to the “signal of a control gene”, said control gene being a gene for which the expression level never, or substantially never, varies whatsoever the conditions (normal or pathologic). The control genes commonly used are housekeeping genes such as actin, Glyceraldehyde-3 phosphate deshydrogenase (GAPDH), tubulin, Tata box binding protein (TBP). The use of such control genes to quantify expression of a gene of interest is well known in the art and does not per se form part of the present invention.

[0064] Thus at various points herein the term “quantitative raw expression value” or “Qri” may be used to describe a ‘normalised’ quantitative expression of a gene:

[0065] To obtain the Qri value for a determined gene i, the following formula can be applied:

$$Qri = {log}_{2} ( \frac{Si}{Sc} \times 1000 ) ,$$

[0066] wherein Si represents the signal obtained for a gene i, and Sc represents the signal obtained for the control gene, Si and Sc being obtained in the same biological sample, if possible during the same experiment.

[0067] This normalisation has particular value when the quantification relies on an amplification method such as PCR.

[0068] Thus, in summary, in methods of the invention, including step (i) as defined above, the expression level of the gene in the cells is preferably “normalised” to a standard gene e.g. a housekeeping gene as described herein. This so called normalised “raw expression value” may be referred to as “Qri” for gene “i” herein.

### Reference Expression Values

[0069] In the present invention the expression level of the gene or genes is compared to a reference value in order that a determination of phenotype (e.g. prognosis) can be made.

[0070] In certain embodiments of the present invention the reference expression value or values may be based on tissue (e.g. brain tissue) obtained from, by way of example:

[0071] (a) histologically normal tissue (same or different tissue) of the subject individual

[0072] (b) a similar or identical region of the brain of a second individual of known glioma status (e.g. normal, afflicted)

[0073] (c) a reference cell line

[0074] (d) an averaged value based on number of reference individuals.

[0075] In preferred embodiments the reference value or values are obtained from a cohort of reference patients afflicted by glioma.

[0076] By “reference patients” as it is defined in the invention is meant patients for which data regarding their survival, the evolution of their pathology, the treatment or surgery that they have received over many months or years are known.

[0077] These reference, or control, patients are regrouped in a panel called cohort. Thus the reference expression value may be determined from expression levels obtained from a reference database of sample phenotypes obtained from this cohort of subjects afflicted with glioma with either a known diagnosis or known clinical outcome after therapy.

[0078] Thus, preferably, in step (ii) of the method the expression level of the gene in the cells can be “centred” with respect to a mean-normalised expression of the gene in a plurality of corresponding reference samples from a cohort of glioma patients. Such a mean-normalised expression may be referred to herein as “Qci”.

[0079] Put another way, in methods of the invention it may be desired to define a quantitative expression value Qi for a gene I, which corresponds to the comparison between:
[0080] the quantitative raw expression value Qri measured for a gene i, in the biological sample of said subject, and
[0081] a Qci value corresponding to the mean of the quantitative expression values obtained for said gene i from each patient of a reference or control cohort of patients

[0082] The reference or control cohort may be composed of patients afflicted by the same glioma e.g. a WHO grade 2 or grade 3 glioma.

[0083] The Qi value can be calculated from Qi=Qri−Qci.

[0084] It will be appreciated therefore that in this step the “centred expression” may be positive (if the expression in the sample is higher than the reference mean, or “over-expressed” compared to the reference mean) or negative (if the expression in the sample is lower than the reference mean, or “under-expressed compared to the reference mean).

[0085] In step (ii) of the method above the normalised expression level of the gene in the cells may be scaled by reference to a deviation score based on the plurality of corresponding samples from the cohort of glioma patients. The “scaled centred” expression may be obtained by dividing the centred expression by the standard deviation.

[0086] The statistical relevance of preferred methods according to the invention is shown below and in the examples.

### Choice of Genes

[0087] In the present invention the genes described herein may be used to provide a “molecular signature” or “gene-expression signature”. Such a signature, as used herein refers, to two or more genes that are co-ordinately expressed in the glioma samples and which can be used to predict or model patients' clinically relevant information (e.g. prognosis, survival time, etc) as a function of the gene expression data.

[0088] Various genes and gene combinations which are preferred embodiments are described herein below in relations to combinations of SEQ ID NOs 1-22.

[0089] In some embodiments at least 1 gene from Table 10 is assessed.

[0090] In some embodiments at least 2 genes from Table 10 are assessed.

[0091] In some embodiments at least 3 genes from Table 10 are assessed.

[0092] In some embodiments at least 2 or 3 genes from the 22 genes of Table 1 are assessed, which combination preferably includes at least 1 gene from Table 10

[0093] By “at least 2 or 3 genes belonging to a group of 22 genes”, it is meant in the invention that 2 or 3, or 4, or 5, or 6, or 7, or 8, or 9, or 10, or 11, or 12, or 13, or 14, or 15, or 16, or 17, or 18, or 19, or 20, or 21, or 22 genes can be used.

[0094] In one embodiment the invention comprises assessing at least 2 genes belonging to a group of 22 genes as described herein, which combination preferably includes at least 1 gene from Table 10.

[0095] In one embodiment the invention comprises assessing at least 3 genes belonging to a group of 22 genes as described herein, which combination preferably includes at least 1 gene from Table 10.

[0096] Preferably at least 3 genes belonging to the group of 22 genes is assessed.

[0097] Preferably at least SEQ ID NO: 3 (POSTN) is assessed.

[0098] In one embodiment the first step of a method according to the invention corresponds to a step of measuring and quantifying the expression level of at least 3 genes comprising or being constituted by the nucleic acid sequences as set forth in SEQ ID NO: 1 to 3, said at least 3 genes belonging to a group of 22 genes comprising or being constituted by the nucleic acid sequences as set forth in SEQ ID NO: 1 to 22.

[0099] Thus, by way of example, the measure of the expression level of the genes represented by SEQ ID NO: 1, SEQ ID NO: 2 and SEQ ID NO: 3 is sufficient to carry out the method according to the invention.

[0100] Thus one condition imposed on this embodiment of the method is that genes comprising or being constituted by the nucleic acid molecules as set forth in SEQ ID NO: 1, SEQ ID NO: 2 and SEQ ID NO: 3 are always present in anyone of the combinations mentioned above.

[0101] For instance, if 4 genes are considered, 19 combinations are possible:

[0102] SEQ ID NO: 1, SEQ ID NO: 2, SEQ ID NO: 3 and SEQ ID NO: 4,

[0103] SEQ ID NO: 1, SEQ ID NO: 2, SEQ ID NO: 3 and SEQ ID NO: 5,

[0104] SEQ ID NO: 1, SEQ ID NO: 2, SEQ ID NO: 3 and SEQ ID NO: 6,

[0105] SEQ ID NO: 1, SEQ ID NO: 2, SEQ ID NO: 3 and SEQ ID NO: 7,

[0106] SEQ ID NO: 1, SEQ ID NO: 2, SEQ ID NO: 3 and SEQ ID NO: 8,

[0107] SEQ ID NO: 1, SEQ ID NO: 2, SEQ ID NO: 3 and SEQ ID NO: 9,

[0108] SEQ ID NO: 1, SEQ ID NO: 2, SEQ ID NO: 3 and SEQ ID NO: 10,

[0109] SEQ ID NO: 1, SEQ ID NO: 2, SEQ ID NO: 3 and SEQ ID NO: 11,

[0110] SEQ ID NO: 1, SEQ ID NO: 2, SEQ ID NO: 3 and SEQ ID NO: 12,

[0111] SEQ ID NO: 1, SEQ ID NO: 2, SEQ ID NO: 3 and SEQ ID NO: 13,

[0112] SEQ ID NO: 1, SEQ ID NO: 2, SEQ ID NO: 3 and SEQ ID NO: 14,

[0113] SEQ ID NO: 1, SEQ ID NO: 2, SEQ ID NO: 3 and SEQ ID NO: 15,

[0114] SEQ ID NO: 1, SEQ ID NO: 2, SEQ ID NO: 3 and SEQ ID NO: 16,

[0115] SEQ ID NO: 1, SEQ ID NO: 2, SEQ ID NO: 3 and SEQ ID NO: 17,

[0116] SEQ ID NO: 1, SEQ ID NO: 2, SEQ ID NO: 3 and SEQ ID NO: 18,

[0117] SEQ ID NO: 1, SEQ ID NO: 2, SEQ ID NO: 3 and SEQ ID NO: 19,

[0118] SEQ ID NO: 1, SEQ ID NO: 2, SEQ ID NO: 3 and SEQ ID NO: 20,

[0119] SEQ ID NO: 1, SEQ ID NO: 2, SEQ ID NO: 3 and SEQ ID NO: 21, and

[0120] SEQ ID NO: 1, SEQ ID NO: 2, SEQ ID NO: 3 and SEQ ID NO: 22,

[0121] The skilled person will know how to determine all the combinations of at least 3 genes among 22 genes encompassed by the invention.

[0122] According to the invention, the 22 genes and their corresponding SEQ ID are represented in the following table 1:

| | Gene | |
|---|---|---|
| SEQ ID | name | Access number (Ensembl) |
| SEQ ID NO: 1 | CHI3L1 | ENSG00000133048 |
| SEQ ID NO: 2 | IGFBP2 | ENSG00000115457 |
| SEQ ID NO: 3 | POSTN | ENSG00000133110 |
| SEQ ID NO: 4 | HSPG2 | ENSG00000142798 |
| SEQ ID NO: 5 | BMP2 | ENSG00000125845 |
| SEQ ID NO: 6 | COL1A1 | ENSG00000108821 |
| SEQ ID NO: 7 | NEK2 | ENSG00000117650 |
| SEQ ID NO: 8 | DLG7 | ENSG00000126787 |
| SEQ ID NO: 9 | FOXM1 | ENSG00000111206 |
| SEQ ID NO: 10 | BIRC5 | ENSG00000089685 |
| SEQ ID NO: 11 | PLK1 | ENSG00000166851 |
| SEQ ID NO: 12 | NKX6-1 | ENSG00000163623 |
| SEQ ID NO: 13 | NRG3 | ENSG00000185737 |
| SEQ ID NO: 14 | BUB1B | ENSG00000156970 |
| SEQ ID NO: 15 | VIM | ENSG00000026025 |
| SEQ ID NO: 16 | TNC | ENSG00000041982 |
| SEQ ID NO: 17 | DLL3 | ENSG00000090932 |
| SEQ ID NO: 18 | JAG1 | ENSG00000101384 |
| SEQ ID NO: 19 | KI67 | ENSG00000148773 |
| SEQ ID NO: 20 | EZH2 | ENSG00000106462 |
| SEQ ID NO: 21 | BUB1 | ENSG00000169679 |
| SEQ ID NO: 22 | AURKA | ENSG00000087586 |

[0123] Table 1 represents the genes according to the invention, and their corresponding SEQ ID, and the corresponding Access number in the Ensembl database (http://www.ensembl.org/index.html).

[0124] Advantageously, the invention relates to the method as defined above which comprises assessing a set of genes including or consisting of at least 2 or at least 3 genes belonging to a group of 22 genes of Table 1, including at least 1 gene from Table 10.

[0125] In general terms, and as described herein, underexpression of APOD, BMP2, DLL3, NRG3 and TACSTD1 may be associated with good prognosis, while overexpression of the remaining genes in Table 1 may be associated with poor prognosis.

[0126] Advantageously, the invention relates to a method for determining, preferably in vitro or ex vivo, from a biological sample of a subject afflicted by a WHO grade 2 or grade 3 glioma, the survival prognosis of said patient,

### Said Method Comprising:

[0127] determining the quantitative expression value Qi for each gene of a set comprising at least 3 genes belonging to a group of 22 genes, said 22 genes comprising or being constituted by the respective nucleic acid sequences SEQ ID NO: 1 to 22,
[0128] wherein said at least 3 genes comprise or are constituted by the respective nucleic acid sequences SEQ ID NO: 1 to 3,
[0129] establishing
   [0130] a first product P₁i for each of said at least 3 genes, between the respective Qi values obtained above for each said at least 3 genes and a first value V₁i, and
   [0131] a second product P₂i for each of said at least 3 genes, between the respective Qi values obtained above for each said at least 3 genes and a second value V₂i,
[0132] wherein
   [0133] said first value Vii corresponds to the shrunken centroid value for a gene i obtained from reference patients having a WHO grade 2 or grade 3 glioma, said reference patients having a median survival higher than 4 years, and
   [0134] said second value V2i corresponds to the shrunken centroid value for a gene i obtained from reference patients having a WHO grade 2 or grade 3 glioma, said reference patients having a median survival lower than 4 years,
      said patients having a WHO grade 2 or grade 3 glioma with a median survival lower or higher than 4 years belonging to a reference cohort of patients afflicted by either a WHO grade 2 or a WHO grade 3 glioma,
[0135] determining the survival rate of said patient as follows:
   [0136] if the sum of the P₁i products of each of said at least 3 genes is higher than the sum of the P₂i products of each of said at least 3 genes, then said subject has a median survival higher than 4 years, and
   [0137] if the sum of the P₁i products of each of said at least 3 genes is lower than or equal to the sum of the P₂i products of each of said at least 3 genes, then said subject has a median survival lower than 4 years.

[0138] According to the invention, the product P₁i is obtained from the following formula:
[0139] P₁i=Qi×V₁i, wherein V₁i corresponds to the shrunken centroid value obtained for a gene i from reference patients having a WHO grade 2 or grade 3 glioma, said reference patients having a median survival higher than 4 years.

[0140] According to the invention, the product P₂i is obtained from the following formula:
[0141] P₂i=Qi×V₂i, wherein V₂i corresponds to the shrunken centroid value obtained for a gene i from reference patients having a WHO grade 2 or grade 3 glioma, said reference patients having a median survival lower than 4 years.

[0142] The shrunken centroid value is established from data obtained from reference, or control, patients, belonging to a reference, or control, cohort of patients afflicted by either a WHO grade 2 or a WHO grade 3 glioma.

[0143] These reference, or control, patients are regrouped in a panel called cohort.

[0144] The cohort can be divided into two sub groups:
[0145] a subgroup of patient afflicted by WHO grade 2 glioma, or WHO grade 3 glioma, said patients having a median survival higher than four (4) years; said patients being considered as having a good prognosis of survival,
[0146] a subgroup of patient afflicted by WHO grade 2 glioma, or WHO grade 3 glioma, said patients having a median survival lower than four (4) years; said patients being considered as having a bad prognosis of survival.

[0147] From the entire cohort, it is possible to obtain the above subgroup by classifying patients according to a hierarchical clustering.

[0148] Cluster analysis or clustering is the assignment of a set of observations into subsets (called clusters) so that observations in the same cluster are similar in some sense.

[0149] Advantageously, the invention relates to the method as defined above, wherein said set comprise at least 7 genes belonging to said group of 22 genes, said at least 7 genes comprising or being constituted by the respective nucleic acid sequences SEQ ID NO: 1 to 7.

[0150] In one advantageous embodiment, the invention relates to the method as defined above, wherein said set comprise at least 9 genes belonging to said group of 22 genes, said at least said at least 9 genes comprising or being constituted by the respective nucleic acid sequences SEQ ID NO: 1 to 9.

[0151] Another advantageous embodiment of the invention relates to the method according to the previous definition, wherein said set consists of all the genes of said group of 22 genes

[0152] More advantageously, the invention relates to the method as defined above, wherein
[0153] if N1>N2, then said patient has a median survival higher than 4 years, preferably from 4 to 10 years, more preferably from 5 to 8 years, in particular about 6 years, and
[0154] if N1≦N2, then said patient has a median survival lower than 4 years, preferably from 0.5 to 3.5 years, more preferably from 0.5 to 2 years, in particular about 1 year,
   wherein

$$N 1 = {\sum }_{i = 1}^{n} ( {P}_{1} i ) - {T}_{1} = ( {\sum }_{i = 1}^{n} ( ( \frac{Qri - Qci}{Ji} ) \times {V}_{1} i ) ) - {T}_{1} ,$$

n varying from 3 to 22, and

$$N 2 = {\sum }_{i = 1}^{n} ( {P}_{2} i ) - {T}_{2} = ( {\sum }_{i = 1}^{n} ( ( \frac{Qri - Qci}{Ji} ) \times {V}_{2} i ) ) - {T}_{2} ,$$

n varying from 3 to 22,
wherein
[0155] Qri represents the quantitative raw expression value measured for a gene i in the biological sample of said subject, and
[0156] Qci represents the mean of the quantitative expression values obtained for said gene i from each patient of said control cohort of patient afflicted by a WHO grade 2 or grade 3 glioma,
[0157] Ji represents the standard deviation of the centroid values obtained for said gene i from each patient of said control cohort of patient afflicted by a WHO grade 2 or grade 3 glioma,
[0158] V₁i corresponds to the shrunken centroid value for said gene i obtained from control patients having a WHO grade 2 or grade 3 glioma with a median survival higher than 4 years,
[0159] V₂i corresponds to the shrunken centroid value for said gene i obtained from control patients having a WHO grade 2 or grade 3 glioma with a median survival lower than 4 years,
[0160] T1 corresponds to the training baseline value for control patients having a WHO grade 2 or grade 3 glioma with a median survival higher than 4 years, and
[0161] T2 corresponds to the training baseline value for control having a WHO grade 2 or grade 3 glioma with a median survival lower than 4 years.

[0162] Advantageously, the invention relates to a method as defined above, wherein the quantitative expression value Qi for a gene i is measured by quantitative techniques chosen among qRT-PCR and DNA Chip.

[0163] In one another advantageous embodiment, the invention relates to the method as defined above, wherein, when the quantitative technique is DNA CHIP, Qci values for a gene i are as follows:

| Genes | Qci |
|---|---|
| SEQ ID NO: 1 | 8.1111 |
| SEQ ID NO: 2 | 8.6287 |
| SEQ ID NO: 3 | 6.0748 |
| SEQ ID NO: 4 | 7.2020 |
| SEQ ID NO: 5 | 9.2810 |
| SEQ ID NO: 6 | 9.1734 |
| SEQ ID NO: 7 | 5.0310 |
| SEQ ID NO: 8 | 5.1660 |
| SEQ ID NO: 9 | 5.1174 |
| SEQ ID NO: 10 | 6.3898 |
| SEQ ID NO: 11 | 8.8992 |
| SEQ ID NO: 12 | 2.2380 |
| SEQ ID NO: 13 | 6.9486 |
| SEQ ID NO: 14 | 6.6286 |
| SEQ ID NO: 15 | 13.6886 |
| SEQ ID NO: 16 | 9.2036 |
| SEQ ID NO: 17 | 8.5740 |
| SEQ ID NO: 18 | 10.7286 |
| SEQ ID NO: 19 | 4.8529 |
| SEQ ID NO: 20 | 8.0629 |
| SEQ ID NO: 21 | 4.8347 |
| SEQ ID NO: 22 | 6.3091 |

[0164] In one another advantageous embodiment, the invention relates to the method as defined above, wherein, when the quantitative technique is qRT-PCR, Qci values for a gene i are as follows:

| Genes | Qci |
|---|---|
| SEQ ID NO: 1 | 9.8895 |
| SEQ ID NO: 2 | 10.7617 |
| SEQ ID NO: 3 | 4.8934 |
| SEQ ID NO: 4 | 8.6122 |
| SEQ ID NO: 5 | 10.0616 |
| SEQ ID NO: 6 | 9.1961 |
| SEQ ID NO: 7 | 7.0401 |
| SEQ ID NO: 8 | 6.7866 |
| SEQ ID NO: 9 | 7.4768 |
| SEQ ID NO: 10 | 8.4759 |
| SEQ ID NO: 11 | 8.4640 |
| SEQ ID NO: 12 | 5.5556 |
| SEQ ID NO: 13 | 9.2268 |
| SEQ ID NO: 14 | 7.4760 |
| SEQ ID NO: 15 | 16.4164 |
| SEQ ID NO: 16 | 7.4201 |
| SEQ ID NO: 17 | 11.9663 |
| SEQ ID NO: 18 | 11.3260 |
| SEQ ID NO: 19 | 9.2557 |
| SEQ ID NO: 20 | 8.4543 |
| SEQ ID NO: 21 | 6.9780 |
| SEQ ID NO: 22 | 7.2556 |

[0165] The invention also relates to a composition comprising oligonucleotides allowing the quantitative measure of the expression level of the genes of a set comprising at least 3 genes belonging to a group of 22 genes, said 22 genes comprising or being constituted by the respective nucleic acid sequences SEQ ID NO: 1 to 22,
[0166] wherein said at least 3 genes comprise or are constituted by the respective nucleic acid sequences SEQ ID NO: 1 to 3,
   preferably for its use for determining, preferably in vitro or ex vivo, from a biological sample of a subject afflicted by a WHO grade 2 or grade 3 glioma, the survival prognosis of said subject.

[0167] Advantageously, the invention relates to a composition as defined above, preferably for its use as defined above, wherein said set comprise at least 7 genes belonging to said group of 22 genes, said at least 7 genes comprising or being constituted by the respective nucleic acid sequences SEQ ID NO: 1 to 7.

[0168] Advantageously, the invention relates to a composition as defined above, preferably for its use as defined above, wherein said set comprise at least 9 genes belonging to a said group of 22 genes, said at least 9 genes comprising or being constituted by the respective nucleic acid sequences SEQ ID NO: 1 to 9.

[0169] Advantageously, the invention relates to a composition as defined above, preferably for its use as defined above, wherein said set consists of all the genes of said group of 22 genes.

[0170] Advantageously, the invention relates to a composition as defined above, preferably for its use as defined above, wherein said composition comprise at least a pair of oligonucleotides allowing the measure of the expression of the genes of said set of genes belonging to said group of 22 genes.

[0171] Advantageously, the invention relates to a composition as defined above, preferably for its use as defined above, wherein said composition comprises at least the oligonucleotides SEQ ID NO: 23-28, preferably at least the oligonucleotides SEQ ID NO: 23-40, more preferably at least the oligonucleotides SEQ ID NO: 23-42, more preferably at least the oligonucleotides SEQ ID NO: 23-54, chosen among the group consisting of the oligonucleotides SEQ ID NO: 23-66, and in particular said composition comprises the oligonucleotides SEQ ID NO: 23-66.

[0172] The invention also relates to a kit comprising:
[0173] oligonucleotides allowing the measure of the expression of the genes of a set comprising at least 3 genes belonging to a group of 22 genes, said 22 genes comprising or being constituted by the respective nucleic acid sequences SEQ ID NO: 1 to 22,
[0174] wherein said at least 3 genes comprise or are constituted by the respective nucleic acid sequences SEQ ID NO: 1 to 3, and
[0175] a support comprising data regarding the expression value of said at least 3 genes belonging to a group of 22 genes obtained from control patients.

[0176] The sequences SEQ ID NO: 1-22 corresponds to the genomic sequence of said genes.

[0177] Thus, as defined above, the invention propose to determine the expression of said genes, i.e. to determine the amount of the transcripts of said genes.

[0178] If a gene encodes more than 1 mRNA, they are called expression variants of said gene.

[0179] The preferred transcripts of the genes according to the invention are the following ones:
[0180] the gene CHI3L1 (SEQ ID NO: 1) expresses 5 variants: Variant 1 (Ensembl n^{o}ENST00000255409), Variant 2 (Ensembl n^{o}ENST00000404436), Variant 3 (Ensembl n^{o}ENST00000473185), Variant 4 (Ensembl n^{o}ENST00000472064) and Variant 5 (Ensembl n^{o}ENST00000478742),
[0181] the gene IGFBP2 (SEQ ID NO: 2) expresses 5 variants: Variant 1 (Ensembl n^{o}ENST00000233809), Variant 2 (Ensembl n^{o}ENST00000490362), Variant 3 (Ensembl n^{o}ENST00000434997), Variant 4 (Ensembl n^{o}ENST00000456764) and Variant 5 (Ensembl n^{o}ENST00000436812),
[0182] the gene POSTN (SEQ ID NO: 3) expresses 11 variants: Variant 1 (Ensembl n^{o}ENST00000379747), Variant 2 (Ensembl n^{o}ENST00000379742), Variant 3 (Ensembl n^{o}ENST00000379743), Variant 4 (Ensembl n^{o}ENST00000379749) and Variant 5 (Ensembl n^{o}ENST00000497145), Variant 6 (Ensembl n^{o}ENST00000478947), Variant 7 (Ensembl n^{o}ENST00000473823), Variant 8 (Ensembl n^{o}ENST00000474646), Variant 9 (Ensembl n^{o}ENST00000538347), Variant 10 (Ensembl n^{o}ENST00000541179) and Variant 11 (Ensembl n^{o}ENST00000541481),
[0183] the gene HSPG2 (SEQ ID NO: 4) express 16 variants: Variant 1 (Ensembl n^{o}ENST00000374695), Variant 2 (Ensembl n^{o}ENST00000486901), Variant 3 (Ensembl n^{o}ENST00000412328), Variant 4 (Ensembl n^{o}ENST00000374673) and Variant 5 (Ensembl n^{o}ENST00000439717), Variant 6 (Ensembl n^{o}ENST00000480900), Variant 7 (Ensembl n^{o}ENST00000498495), Variant 8 (Ensembl n^{o}ENST00000427897), Variant 9 (Ensembl n^{o}ENST00000493940), Variant 10 (Ensembl n^{o}ENST00000374676), Variant 11 (Ensembl n^{o}ENST00000469378), Variant 12 (Ensembl n^{o}ENST00000481644), Variant 13 (Ensembl n^{o}ENST00000426143), Variant 14 (Ensembl n^{o}ENST00000471322), Variant 15 (Ensembl n^{o}ENST00000453796) and Variant 16 (Ensembl n^{o}ENST00000430507),
[0184] the gene BMP2 (SEQ ID NO: 5) expresses only one mRNA (Ensembl n^{o}ENST00000378827),
[0185] the gene COL1A1 (SEQ ID NO: 6) expresses 13 variants: Variant 1 (Ensembl n^{o}ENST00000225964), Variant 2 (Ensembl n^{o}ENST00000474644), Variant 3 (Ensembl n^{o}ENST00000495677), Variant 4 (Ensembl n^{o}ENST00000485870) and Variant 5 (Ensembl n^{o}ENST00000463440), Variant 6 (Ensembl n^{o}ENST00000471344), Variant 7 (Ensembl n^{o}ENST00000476387), Variant 8 (Ensembl n^{o}ENST00000494334), Variant 9 (Ensembl n^{o}ENST00000486572), Variant 10 (Ensembl n^{o}ENST00000507689), Variant 11 (Ensembl n^{o}ENST00000504289), Variant 12 (Ensembl n^{o}ENST00000511732) and Variant 13 (Ensembl n^{o}ENST00000510710),
[0186] the gene NEK2 (SEQ ID NO: 7) expresses 5 variants: Variant 1 (Ensembl n^{o}ENST00000366999), Variant 2 (Ensembl n^{o}ENST00000366998), Variant 3 (Ensembl n^{o}ENST00000489633), Variant 4 (Ensembl n^{o}ENST00000462283) and Variant 5 (Ensembl n^{o}ENST00000540251),
[0187] the gene DLG7 (SEQ ID NO: 8) expresses 2 variants: Variant 1 (Ensembl n^{o}ENST00000247191) and Variant 2 (Ensembl n^{o}ENST00000395425),
[0188] the gene FOX M1 (SEQ ID NO: 9) expresses 9 variants: Variant 1 (Ensembl n^{o}ENST00000361953), Variant 2 (Ensembl n^{o}ENST00000359843), Variant 3 (Ensembl n^{o}ENST00000342628), Variant 4 (Ensembl n^{o}ENST00000536066) and Variant 5 (Ensembl n^{o}ENST00000538564), Variant 6 (Ensembl n^{o}ENST00000545049), Variant 7 (Ensembl n^{o}ENST00000366362), Variant 8 (Ensembl n^{o}ENST00000537018) and Variant 9 (Ensembl n^{o}ENST00000535350),
[0189] the gene BIRC5 (SEQ ID NO: 10) expresses 4 variants: Variant 1 (Ensembl n^{o}ENST00000301633), Variant 2 (Ensembl n^{o}ENST00000350051), Variant 3 (Ensembl n^{o}ENST00000374948) and Variant 4 (Ensembl n^{o}ENST00000432014),
[0190] the gene PLK1 (SEQ ID NO: 11) expresses 3 variants: Variant 1 (Ensembl n^{o}ENST00000300093), Variant 2 (Ensembl n^{o}ENST00000330792) and Variant 3 (Ensembl n^{o}ENST00000425844),
[0191] the gene NKX6-1 (SEQ ID NO: 12) expresses 2 variants: Variant 1 (Ensembl n^{o}ENST00000295886) and Variant 2 (Ensembl n^{o}ENST00000515820),
[0192] the gene NRG3(SEQ ID NO: 13) expresses 7 variants: Variant 1 (Ensembl n^{o}ENST00000372142), Variant 2 (Ensembl n^{o}ENST00000372141), Variant 3 (Ensembl n^{o}ENST00000404547), Variant 4 (Ensembl n^{o}ENST00000404576) and Variant 5 (Ensembl n^{o}ENST00000537287), Variant 6 (Ensembl n^{o}ENST00000537893), Variant 7 (Ensembl n^{o}ENST00000545131),
[0193] the gene BUB1B (SEQ ID NO: 14) expresses 3 variants: Variant 1 (Ensembl n^{o}ENST00000287598), Variant 2 (Ensembl n^{o}ENST00000412359) and Variant 3 (Ensembl n^{o}ENST00000442874),
[0194] the gene VIM (SEQ ID NO: 15) expresses 11 variants: Variant 1 (Ensembl n^{o}ENST00000224237), Variant 2 (Ensembl n^{o}ENST00000487938), Variant 3 (Ensembl n^{o}ENST00000469543), Variant 4 (Ensembl n^{o}ENST00000478317) and Variant 5 (Ensembl n^{o}ENST00000478746), Variant 6 (Ensembl n^{o}ENST00000497849), Variant 7 (Ensembl n^{o}ENST00000485947), Variant 8 (Ensembl n^{o}ENST00000421459), Variant 9 (Ensembl n^{o}ENST00000495528), Variant 10 (Ensembl n^{o}ENST00000544301) and Variant 11 (Ensembl n^{o}ENST00000545533),
[0195] the gene TNC (SEQ ID NO: 16) expresses 17 variants: Variant 1 (Ensembl n^{o}ENST00000350763), Variant 2 (Ensembl n^{o}ENST00000460345), Variant 3 (Ensembl n^{o}ENST00000476680), Variant 4 (Ensembl n^{o}ENST00000481475) and Variant 5 (Ensembl n^{o}ENST00000473855), Variant 6 (Ensembl n^{o}ENST00000498724), Variant 7 (Ensembl n^{o}ENST00000542877), Variant 8 (Ensembl n^{o}ENST00000423613), Variant 9 (Ensembl n^{o}ENST00000534839), Variant 10 (Ensembl n^{o}ENST00000341037), Variant 11 (Ensembl n^{o}ENST00000537320), Variant 12 (Ensembl n^{o}ENST00000544972), Variant 13 (Ensembl n^{o}ENST00000340094), Variant (Ensembl n^{o}ENST00000345230) and Variant 15 (Ensembl n^{o}ENST00000346706), Variant 16 (Ensembl n^{o}ENST00000442945) and Variant 17 (Ensembl n^{o}ENST00000535648),
[0196] the gene DLL3 (SEQ ID NO: 17) expresses 2 variants: Variant 1 (Ensembl n^{o}ENST00000205143), Variant 2 (Ensembl n^{o}ENST00000356433),
[0197] the gene JAG1 (SEQ ID NO: 18) expresses 3 variants: Variant 1 (Ensembl n^{o}ENST00000254958), Variant 2 (Ensembl n^{o}ENST00000488480) and Variant 3 (Ensembl n^{o}ENST00000423891),
[0198] the gene KI67 (SEQ ID NO: 19) expresses 8 variants: Variant 1 (Ensembl n^{o}ENST00000368654), Variant 2 (Ensembl n^{o}ENST00000368653), Variant 3 (Ensembl n^{o}ENST00000464771), Variant 4 (Ensembl n^{o}ENST00000478293) and Variant 5 (Ensembl n^{o}ENST00000484853), Variant 6 (Ensembl n^{o}ENST00000368652), Variant 7 (Ensembl n^{o}ENST00000537609) and Variant 8 (Ensembl n^{o}ENST00000538447),
[0199] the gene EZH2 (SEQ ID NO: 20) expresses 12 variants: Variant 1 (Ensembl n^{o}ENST00000483967), Variant 2 (Ensembl n^{o}ENST00000498186), Variant 3 (Ensembl n^{o}ENST00000492143), Variant 4 (Ensembl n^{o}ENST00000320356) and Variant 5 (Ensembl n^{o}ENST00000483012), Variant 6 (Ensembl n^{o}ENST00000478654), Variant 7 (Ensembl n^{o}ENST00000541220), Variant 8 (Ensembl n^{o}ENST00000460911), Variant 9 (Ensembl n^{o}ENST00000469631), Variant 10 (Ensembl n^{o}ENST00000350995), Variant 11 (Ensembl n^{o}ENST00000476773) and Variant 12 (Ensembl n^{o}ENST00000536783),
[0200] the gene BUB1 (SEQ ID NO: 21) expresses 13 variants: Variant 1 (Ensembl n^{o}ENST00000302759), Variant 2 (Ensembl n^{o}ENST00000409311), Variant 3 (Ensembl n^{o}ENST00000465029), Variant 4 (Ensembl n^{o}ENST00000466333) and Variant 5 (Ensembl n^{o}ENST00000420328), Variant 6 (Ensembl n^{o}ENST00000436916), Variant 7 (Ensembl n^{o}ENST00000447014), Variant 8 (Ensembl n^{o}ENST00000468927), Variant 9 (Ensembl n^{o}ENST00000477481), Variant 10 (Ensembl n^{o}ENST00000490632), Variant 11 (Ensembl n^{o}ENST00000478175), Variant 12 (Ensembl n^{o}ENST00000535254) and Variant 13 (Ensembl n^{o}ENST00000541432), and
[0201] the gene AURKA (SEQ ID NO: 22) expresses 14 variants: Variant 1 (Ensembl n^{o}ENST00000347343), Variant 2 (Ensembl n^{o}ENST00000441357), Variant 3 (Ensembl n^{o}ENST00000395915), Variant 4 (Ensembl n^{o}ENST00000395913) and Variant 5 (Ensembl n^{o}ENST00000456249), Variant 6 (Ensembl n^{o}ENST00000422322), Variant 7 (Ensembl n^{o}ENST00000420474), Variant 8 (Ensembl n^{o}ENST00000395914), Variant 9 (Ensembl n^{o}ENST00000395907), Variant 10 (Ensembl n^{o}ENST00000451915), Variant 11 (Ensembl n^{o}ENST00000312783), Variant 12 (Ensembl n^{o}ENST00000371356), Variant 13 (Ensembl n^{o}ENST00000395909), and Variant 13 (Ensembl n^{o}ENST00000395911).

[0202] The skilled person has sufficient guidance, referring to the Ensembl accession number, to determine what mRNA are quantified regarding a determined gene i.

[0203] For instance, the amount of the mRNA listed in the table 2 can be quantified according to the invention:

TABLE 2
represents the genes according to the invention, and their corresponding
SEQ ID, and, for each of said gene an example of mRNA represented
by its SEQ ID, and the corresponding Access number
in the NCBI database (http://www.ncbi.nlm.nih.gov/).

| | Gene | | |
|---|---|---|---|
| Gene SEQ ID | name | SEQ ID mRNA | SeqRef (of mRNA) |
| SEQ ID NO: 1 | CHI3L1 | SEQ ID NO: 67 | NM_001276 |
| SEQ ID NO: 2 | IGFBP2 | SEQ ID NO: 68 | NM_000597 |
| SEQ ID NO: 3 | POSTN | SEQ ID NO: 69 | NM_006475 |
| SEQ ID NO: 4 | HSPG2 | SEQ ID NO: 70 | NM_005529 |
| SEQ ID NO: 5 | BMP2 | SEQ ID NO: 71 | NM_001200 |
| SEQ ID NO: 6 | COL1A1 | SEQ ID NO: 72 | NM_000088 |
| SEQ ID NO: 7 | NEK2 | SEQ ID NO: 73 | NM_002497 |
| SEQ ID NO: 8 | DLG7 | SEQ ID NO: 74 | NM_014750 |
| SEQ ID NO: 9 | FOXM1 | SEQ ID NO: 75 | NM_021953 |
| SEQ ID NO: 10 | BIRC5 | SEQ ID NO: 76 | NM_001012270 |
| SEQ ID NO: 11 | PLK1 | SEQ ID NO: 77 | NM_005030 |
| SEQ ID NO: 12 | NKX6-1 | SEQ ID NO: 78 | NM_006168 |
| SEQ ID NO: 13 | NRG3 | SEQ ID NO: 79 | NM_001165972 |
| SEQ ID NO: 14 | BUB1B | SEQ ID NO: 80 | NM_001211 |
| SEQ ID NO: 15 | VIM | SEQ ID NO: 81 | NM_003380 |
| SEQ ID NO: 16 | TNC | SEQ ID NO: 82 | NM_002160 |
| SEQ ID NO: 17 | DLL3 | SEQ ID NO: 83 | NM_016941 |
| SEQ ID NO: 18 | JAG1 | SEQ ID NO: 84 | NM_000214 |
| SEQ ID NO: 19 | KI67 | SEQ ID NO: 85 | NM_002417 |
| SEQ ID NO: 20 | EZH2 | SEQ ID NO: 86 | NM_004456 |
| SEQ ID NO: 21 | BUB1 | SEQ ID NO: 87 | NM_004336 |
| SEQ ID NO: 22 | AURKA | SEQ ID NO: 88 | NM_003600 |

[0204] Thus, in the first step of the method according to the invention, the gene expression is measured by quantifying the amount of at least one variant listed above or at least one mRNA expressed by the genes according to the invention.

[0205] The invention also encompasses the mRNA having at least 90% identity with the above variants, which includes single-nucleotide polymorphism (SNP) or non phenotype associated mutations that can occur in DNA.

[0206] In one advantageous embodiment, the invention relates to the method as defined herein, wherein said set comprise at least 7 genes belonging to said group of 22 genes, said at least 7 genes comprising or being constituted by the respective nucleic acid sequences SEQ ID NO: 1 to 7.

[0207] Thus, according to this advantageous embodiment, the measure of the expression level of the genes represented by SEQ ID NO: 1, SEQ ID NO: 2, SEQ ID NO: 3, SEQ ID NO: 4, SEQ ID NO: 5, SEQ ID NO: 6 and SEQ ID NO: 7 is able to carry out the method according to the invention. In preferred embodiments this may yield a percentage of error of at most 5%.

[0208] Another advantageous embodiment of the invention relates to the method as defined above, wherein said set comprise at least 9 genes belonging to said group of 22 genes, said at least said at least 9 genes comprising or being constituted by the respective nucleic acid sequences SEQ ID NO: 1 to 9.

[0209] Thus, according to this advantageous embodiment, the measure of the expression level of the genes represented by SEQ ID NO: 1, SEQ ID NO: 2, SEQ ID NO: 3, SEQ ID NO: 4, SEQ ID NO: 5, SEQ ID NO: 6, SEQ ID NO: 7, SEQ ID NO: 8 and SEQ ID NO: 9 is able to carry out the method according to the invention. In preferred embodiments this may yield a percentage of error of at most 5%.

[0210] The invention also relates to the method as defined above, wherein said set comprise at least 10 genes belonging to a said group of 22 genes, said at least 10 genes comprising or being constituted by the respective nucleic acid sequences SEQ ID NO: 1 to 10.

[0211] Thus, according to this advantageous embodiment, the measure of the expression level of the genes represented by SEQ ID NO: 1, SEQ ID NO: 2, SEQ ID NO: 3, SEQ ID NO: 4, SEQ ID NO: 5, SEQ ID NO: 6, SEQ ID NO: 7, SEQ ID NO: 8, SEQ ID NO: 9 and SEQ ID NO: 10 is able to carry out the method according to the invention. In preferred embodiments this may yield a percentage of error of at most 5%.

[0212] The invention also relates to the method as defined above, wherein said set comprise at least 16 genes belonging to a said group of 22 genes, said at least 16 genes comprising or being constituted by the respective nucleic acid sequences SEQ ID NO: 1 to 16.

[0213] Thus, according to this advantageous embodiment, the measure of the expression level of the genes represented by SEQ ID NO: 1, SEQ ID NO: 2, SEQ ID NO: 3, SEQ ID NO: 4, SEQ ID NO: 5, SEQ ID NO: 6, SEQ ID NO: 7, SEQ ID NO: 8, SEQ ID NO: 9, SEQ ID NO: 10, SEQ ID NO: 11, SEQ ID NO: 12, SEQ ID NO: 13, SEQ ID NO: 14, SEQ ID NO: 15 and SEQ ID NO: 16 is able to carry out the method according to the invention. In preferred embodiments this may yield a percentage of error of at most 5%.

[0214] Thus in preferred embodiments the percentage of error according to the invention may be from 0 to 5%, preferably from 1 to 3%, more preferably from 0 to 1.5%.

[0215] A more advantageous embodiment of the invention relates to the method previously defined, wherein said set consists of all the genes of said group of 22 genes.

[0216] The lowest error rate is obtained when the expression level of all the 22 genes represented by the SEQ ID NO: 1-22 is measured.

### Sub-Group or Class Analysis

[0217] The expression of the genes, gene combinations, or gene signatures comprised above, when compared with a suitable reference (e.g. the outcome of the comparison in step (ii) above) is used to determine or predict a clinical phenotype. In particular the expression value described may be used to assign the sample to a class or “subgroup” of glioma patients having a particular predicted phenotype or prognosis.

[0218] It will be appreciated that from an entire cohort of patients, it is possible to define subgroups by classifying patients according to a hierarchical clustering.

[0219] Cluster analysis or clustering is the assignment of a set of observations into subsets (called clusters) so that observations in the same cluster are similar in some sense.

[0220] Hierarchical clustering is a commonly used statistical tool for exploring relationships in statistical data. It clusters data based on a user defined measure called “distance”. “Similarities”, “correlation”, are sometimes used in place of “distances”, because users' definition of “distance” is related to “similarities” or “correlation”. There are a large number of variants of hierarchical clustering. The differences are in the way distances are defined and computations (e.g., average-linkage, top-down) are implemented.

[0221] Preferably the cohort of glioma patients is divided into classes having the pre-defined survival prognosis. The expression value or signature is “compared with” a reference expression value or signature derived from each class in order to assign it to, or classify it as, one of the classes.

[0222] Preferably there are two classes, representing “good” or “bad” prognosis. The classes will be defined such as to ensure each contains a significant number of members of the cohort, but apart from this it will be understood that the classification may be done according to any desired prognosis criterion. The classifiers may be used to make a prediction in the absence of therapy, or to inform a decision about the requirement for therapy, or further therapy.

[0223] In one embodiment the desired prognosis criterion is survival period e.g. a median survival value of higher or lower than ‘Y’ years where Y may, for example, be 3 or 4 years. However the classes may be split according to other predefined risk factors established by post hoc analysis of the cohort of glioma patients.

### Assigning the Expression to a Class

[0224] A number of methods may be used to assign which class the sample is assigned to, or (to put it another way) to decide which “gene expression signature” the sample most closely matches.

[0225] At the simplest level, it will be appreciated that if the gene is routinely over-expressed in one group and under-expressed in the other, then whether or not the gene is over-expressed or under-expressed (e.g. based on the normalised, centred expression) can be used to assign it to one or other group.

[0226] Particularly where there are multiple genes, a linear combination or weighted average of the expression of the selected set of genes may be used to assign the sample to one or other group.

[0227] Example methods for defining and assigning the sample gene signature include those discussed by Diaz-Uriarte (2004) “Molecular Signatures from Gene Expression Data” available at http://www.citebase.org/abstract?id=oai:arXiv.org:q-bio/0401043 (see also supplementary material cited therein). Example methods for defining and assigning the sample gene signature include those discussed by Diaz-Uriarte (2004) “Molecular Signatures from Gene Expression Data” available at http://www.citebase.org/abstract? id=oai:arXiv.org:q-bio/0401043, like K nearest neighbors (KNN, therein and [1]) and support vector machines (therein and [2]). Example analyses non exhaustively include regression models (PLS [3], logistic regression [4]), linear discriminant analysis [5], weighted gene voting [6], centroid or shrunken centroid analysis [7], classification and regression trees [8] and machine learning methods like neural networks [9]. (1-Deegalla S, Boström H: Classification of microarrays with KNN: comparison of dimensionality reduction methods. Yin H et al. (Eds). IDEAL 2007, LNCS 4881, pp 800-809, 2007. http://people.dsv.su.se/^{˜}henke/papers/deegalla07.pdf; 2-Lee Y, Lee C K: Classification of multiple cancer types by multicategory support vector machines using gene expression data. Bioinformatics 2003, 19:1132-1139; 3-Gusnanto A, Pawitan Y, Ploner A: Variable selection in gene and protein expression data. Technical report, Department of Medical Epidemiology and Biostatistics, Karolinska Institutet, Stockholm, 2003; 4—Eilers P H C, Boer J M, van Ommen G J, van Houwelingen H C: Classification of microarray data with penalized logistic regression. Proceedings of SPIE volume 4266: progress in biomedical optics and imaging 2001, San José; 5-Dudoit S, Fridlyand J, Speed T P: Comparison of discrimination methods for the classification of tumors suing gene expression data. J Am Stat Assoc 2002, 97:77-87; 6-Ramaswamy S, Ross K N, Lander E S, Golub T R: A molecular signature of metastasis in primary solid tumors. Nature Genetics 2003, 33:49-54; 7-Tibshirani R, Hastie T, Narasimhan B, Chu G: Diagnosis of multiple cancer types by shrunken centroids of gene expression. Proc Natl Acad Sci USA 2002, 99:6567-6572; 8-Peter J. Tan, David L. Dowe, Trevor I. Dix: Building Classification Models from Microarray Data with Tree-Based Classification Algorithms. Australian Conference on Artificial Intelligence 2007: 589-598; 9—O'Neill M C, Song L: Neural network analysis of lymphoma microarray data: prognosis and diagnosis near-perfect. BMC Bioinformatics 2003, 4:13)

### Preferred Statistical Analysis—Use of Centroids

[0228] A preferred method for use in the present invention is shrunken centroid analysis, which is described in more detail hereinafter. It will be appreciated that this could be performed mutatis mutandis based on centroids rather than shrunken centroids.

[0229] In this embodiment the invention relates to a method for determining, preferably in vitro or ex vivo, from a biological sample of a subject afflicted by a WHO grade 2 or grade 3 glioma, the survival prognosis of said patient,

### Said Method Comprising:

[0230] determining the quantitative expression value Qi for each gene of a set which preferably comprises at least X genes belonging to a group of 22 genes, said 22 genes comprising to or being constituted by the respective nucleic acid sequences SEQ ID NO: 1 to 22,
[0231] establishing
   [0232] a first product P₁i for each of said at least X genes, between the respective Qi values obtained above for each said at least X genes and a first value V₁i, and
   [0233] a second product P₂i for each of said at least X genes, between the respective Qi values obtained above for each said at least X genes and a second value V₂i,
[0234] wherein
   [0235] said first value Vii corresponds to the shrunken centroid value for a gene i obtained from reference patients having a WHO grade 2 or grade 3 glioma, said reference patients having a median survival higher than Y years, and
   [0236] said second value V2i corresponds to the shrunken centroid value for a gene i obtained from reference patients having a WHO grade 2 or grade 3 glioma, said reference patients having a median survival lower than Y years,
      said patients having a WHO grade 2 or grade 3 glioma with a median survival lower or higher than Y years belonging to a reference cohort of patients afflicted by either a WHO grade 2 or a WHO grade 3 glioma,
[0237] determining the survival rate of said patient as follows:
   [0238] if the sum of the P₁i products of each of said at least X genes is higher than the sum of the P₂i products of each of said at least X genes, then said subject has a median survival higher than Y years, and
   [0239] if the sum of the P₁i products of each of said at least X genes is lower than or equal to the sum of the P₂i products of each of said at least X genes, then said subject has a median survival lower than Y years.

[0240] Preferably ‘Y’ years is simply an illustrative pre-determined clinically relevant survival rate. Typically it may be 4 i.e. the method can be used to stratify patients into groups of subjects having predicted survival rates of higher or lower than 4 years.

[0241] Preferably X is 3 i.e. the expression of at least 3 genes are assessed. The present Inventors have shown that the expression level of at least 3 determined genes belonging to a group of 22 determined genes is sufficient to propose an effective prognosis method of individuals afflicted by gliomas,

[0242] Said least 3 determined genes being preferably: CHI3L1, IGFBP2 and POSTN. i.e. the 3 genes preferably comprise or are constituted by the respective nucleic acid sequences SEQ ID NO: 1 to 3.

[0243] As a part of the method according to this embodiment of the invention, two products (mathematical products) are calculated for each gene i, i.e. for each gene of said at least 3 genes belonging to the group of 22 genes:

[0244] P₁i: the first product P₁ for a determined gene i (e.g. SEQ ID NO: i, i varying from 1 to at least 3), and

[0245] P₂i: the second product P₂ for a determined gene i (e.g. SEQ ID NO: i, i varying from 1 to at least 3).

[0246] As mentioned above, regarding the definition of the i variable, the first product P₁ for the gene SEQ ID NO: 1 will be annotated P₁1, the first product P₁ for the gene SEQ ID NO: 2 will be annotated P₁2, first product P₁ for the gene SEQ ID NO: 3 will be annotated P₁3, etc. . . .

[0247] In the same way, the second product P₂ for the gene SEQ ID NO: 1 will be annotated P₂1, the second product P₂ for the gene SEQ ID NO: 2 will be annotated P₁2, first product P₂ for the gene SEQ ID NO: 3 will be annotated P₂3, etc. . . .

[0248] According to the invention, the product P₁i is obtained from the following formula: P₁i=Qi×V₁i, wherein V₁i corresponds to the shrunken centroid value obtained for a gene i from reference patients having a WHO grade 2 or grade 3 glioma, said reference patients having a median survival higher than Y (e.g. 4) years.

[0249] According to the invention, the product P₂i is obtained from the following formula: P₂i=Qi×V₂i, wherein V₂i corresponds to the shrunken centroid value obtained for a gene i from reference patients having a WHO grade 2 or grade 3 glioma, said reference patients having a median survival lower than Y (e.g. 4) years.

[0250] The shrunken centroid value is established from data obtained from reference, or control, patients, belonging to a reference, or control, cohort of patients afflicted by either a WHO grade 2 or a WHO grade 3 glioma.

[0251] As noted above, reference, or control, patients are regrouped in a panel called cohort. The cohort can be divided into two sub groups:
[0252] a subgroup of patient afflicted by WHO grade 2 glioma, or WHO grade 3 glioma, said patients having a median survival higher than Y (e.g. 4) years; said patients being considered as having a good prognosis of survival,
[0253] a subgroup of patient afflicted by WHO grade 2 glioma, or WHO grade 3 glioma, said patients having a median survival lower than Y (e.g. (4) years; said patients being considered as having a bad prognosis of survival.

[0254] From the data of the reference patients belonging to the cohort, it is possible, to determine a shrunken centroid value from the quantitative value Qi obtained for each gene i of at least the 3 genes e.g. SEQ ID NO: 1, SEQ ID NO: 2 and SEQ ID NO: 3.

[0255] The shrunken centroid calculation is well known in the art, and disclosed for instance in Narashiman and Chu, [Narashiman and Chu (2002) PNAS 99:6567-6572]

[0256] The centroid is the average gene expression for each gene in each class divided by the within-class standard deviation for that gene.

[0257] Nearest centroid classification takes the gene expression profile of a new sample, and compares it to each of these class centroids. The class whose centroid that it is closest to, in distance, is the predicted class for that new sample.

[0258] Nearest shrunken centroid classification makes one important modification to standard nearest centroid classification. It “shrinks” each of the class centroids toward the overall centroid for all classes by an amount we call the threshold. This shrinkage consists of moving the centroid towards zero by threshold, setting it equal to zero if it hits zero. For example if threshold was 2.0, a centroid of 3.2 would be shrunk to 1.2, a centroid of −3.4 would be shrunk to −1.4, and a centroid of 1.2 would be shrunk to zero.

[0259] After shrinking the centroids, the new sample is classified by the usual nearest centroid rule, but using the shrunken class centroids.

[0260] This shrinkage has two advantages:

[0261] 1) it can make the classifier more accurate by reducing the effect of noisy genes,

[0262] 2) it does automatic gene selection.

[0263] In particular, if a gene is shrunk to zero for all classes, then it is eliminated from the prediction rule. Alternatively, it may be set to zero for all classes except one, and we learn that high or low expression for that gene characterizes that class.

[0264] The user decides on the value to use for threshold. Typically one examines a number of different choices.

[0265] From the patients of the first subgroup, a shrunken centroid V₁ value is determined for each gene, e.g. for each of the genes of said at least 3 genes of SEQ ID NO: 1, SEQ ID NO: 2 and SEQ ID NO: 3 belonging to the group of 22 genes.

[0266] From the patients of the second subgroup, a shrunken centroid V₂ value is determined for each gene, e.g. for each of the genes of said at least 3 genes of SEQ ID NO: 1, SEQ ID NO: 2 and SEQ ID NO: 3 belonging to the group of 22 genes.

[0267] In other words, for a determined gene i, two shrunken centroid values are obtained.

[0268] By way of example, if only the expression value of said at least 3 genes (SEQ ID NO: 1-3) is considered, 6 shrunken centroid values will be used:
[0269] V₁1 and V₂1, for the gene SEQ ID NO: 1
[0270] V₁2 and V₂2, for the gene SEQ ID NO: 2, and
[0271] V₁3 and V₂3, for the gene SEQ ID NO: 3.

[0272] Also, at the end of the step 2 of the method according to the invention, if only the expression value of said at least 3 genes (SEQ ID NO: 1-3) is considered, 6 products P will be obtained:
[0273] P₁1 and P₂1, for the gene SEQ ID NO: 1
[0274] P₁2 and P₂2, for the gene SEQ ID NO: 2, and
[0275] P₁3 and P₂3, for the gene SEQ ID NO: 3.

[0276] The third step of this embodiment of a method according to the invention corresponds to the comparison of the sum of the products P obtained at the previous step “corrected” by subtracting the training baseline T to each of the sums, i.e. T₁ and T₂.

[0277] The training baseline represents the “position” of the centroids in the space of the genes used to build the predictor.

### According to the Invention:

[0278] T1 corresponds to the baseline value for control patients having a WHO grade 2 or grade 3 glioma with a median survival higher than 4 years, and
[0279] T2 corresponds to the baseline value for control having a WHO grade 2 or grade 3 glioma with a median survival lower than 4 years.

[0280] Thus, if the sum of the P₁ product minus the baseline is higher than the sum of the P₂ product minus the baseline, therefore, the biological of the patient from which the expression levels of said at least (say) 3 genes have been calculated corresponds to a low grade glioma, with a good prognosis of survival, and the patient have a median of survival higher than (say) 4 years.

[0281] On the contrary, if the sum of the P₁ product minus the baseline is lower than, or equal to, the sum of the P₂ product minus the baseline, therefore, the biological of the patient from which the expression levels of said at least (say) 3 genes have been calculated corresponds to a low grade glioma, with a bad prognosis of survival, and the patient have a median of survival lower than (say) 4 years.

[0282] For instance, in the case of only the expression level of the genes SEQ ID NO: 1, SEQ NO: 2 and SEQ ID NO: 3 is measured, the prognosis conclusion will be as follows:

$$\begin{matrix}if ( {\sum }_{i = 1}^{3} {P}_{1} i ) - {T}_{1} = ( {P}_{1} 1 + {P}_{1} 2 + {P}_{1} 3 ) - {T}_{1} > \\ ( {\sum }_{i = 1}^{3} {P}_{2} i ) - {T}_{2} \\ = ( {P}_{2} 1 + {P}_{2} 2 + {P}_{2} 3 ) - {T}_{2} ,\end{matrix}$$

then the patient have a good prognosis of survival, and has a median survival higher than 4 years, and

$$\begin{matrix}if ( {\sum }_{i = 1}^{3} {P}_{1} i ) - {T}_{1} = ( {P}_{1} 1 + {P}_{1} 2 + {P}_{1} 3 ) - {T}_{1} \leq \\ ( {\sum }_{i = 1}^{3} {P}_{2} i ) - {T}_{2} \\ = ( {P}_{2} 1 + {P}_{2} 2 + {P}_{2} 3 ) - {T}_{2} ,\end{matrix}$$

then the patient have a bad prognosis of survival, and has a median survival lower than 4 years.

[0283] The same applies mutatis mutandis for 4 to 22 genes of the group of 22 genes according to the invention.

[0284] To summarize, in one embodiment according to the invention is as follows:

[0285] In a biological sample of a patient afflicted by a low grade glioma:
[0286] 1—the expression level of at least the genes of SEQ ID NO: 1, SEQ ID NO: 2 and SEQ ID NO: 3, among a group of 22 genes represented by the respective sequences SEQ ID NO: 1-22, is measured, to obtain a quantitative value Qi for each of said at least 3 genes,
[0287] 2—For each of said at least 3 genes the products P₁i and P₂i is determined such that
   [0288] P₁i=Qi×V₁i, wherein V₁i is the shrunken centroid value for a gene i obtained from reference patients having a low grade glioma, said patient having a median survival higher than 4 years, and
   [0289] P₂i=Qi×V₂i, wherein V₂i is the shrunken centroid value for a gene i obtained from reference patients having a low grade glioma, said patient having a median survival lower than 4 years.
[0290] 3—For each of said at least 3 genes, the sum of P₁i and P₂i products is established, and
   [0291] if the sum of P₁i>sum of P₂i, then the patient have a good prognosis (median survival>4 years),
   [0292] if the sum of P₁i≦sum of P₂i, then the patient have a good prognosis (median survival<4 years),
[0293] preferably
   [0294] if the sum of P₁i−T₁>sum of P₂i−T₂, then the patient have a good prognosis (median survival>4 years),
   [0295] if the sum of P₁i−T₁≦sum of P₂i−T₂, then the patient have a good prognosis (median survival<4 years),

[0296] The invention also relates to a method as defined above, wherein the quantitative expression value Qi for a gene i corresponds to the comparison between:
[0297] the quantitative raw expression value Qri measured for a gene i, in the biological sample of said subject, and
[0298] a Qci value corresponding to the mean of the quantitative expression values obtained for said gene i from each patient of said control cohort of patient afflicted by a WHO grade 2 or grade 3 glioma,
   the Qi value being such that Qi=Qri−Qci.

[0299] As explained previously, preferably according to the invention, the quantitative raw expression value Qri is a normalized value of the signal detected for a gene i.

[0300] In still another advantageous embodiment, the invention relates to the method previously defined, wherein
[0301] if N1>N2, then said patient has a median survival higher than Y years, preferably higher than 4 years, preferably from 4 to 10 years, more preferably from 5 to 8 years, in particular about 6 years, and
[0302] if N1≦N2, then said patient has a median survival lower than Y years, preferably lower than 4 years, preferably from 0.5 to 3.5 years, more preferably from 0.5 to 2 years, in particular about 1 year,
   wherein

$$N 1 = {\sum }_{i = 1}^{n} ( {P}_{1} i ) - {T}_{1} = ( {\sum }_{i = 1}^{n} ( ( \frac{Qri - Qci}{Ji} ) \times {V}_{1} i ) ) - {T}_{1} ,$$

n varying from 3 to 22, and

$$N 2 = {\sum }_{i = 1}^{n} ( {P}_{2} i ) - {T}_{2} = ( {\sum }_{i = 1}^{n} ( ( \frac{Qri - Qci}{Ji} ) \times {V}_{2} i ) ) - {T}_{2} ,$$

n varying from 3 to 22,
wherein
[0303] Qri represents the quantitative raw expression value measured for a gene i in the biological sample of said subject, and
[0304] Qci represents the mean of the quantitative expression values obtained for said gene i from each patient of said control cohort of patient afflicted by a WHO grade 2 or grade 3 glioma,
[0305] Ji represents the standard deviation of the shrunken centroid values obtained for said gene i from each patient of said control cohort of patient afflicted by a WHO grade 2 or grade 3 glioma,
[0306] V₁i corresponds to the shrunken centroïd value for said gene i obtained from control patients having a WHO grade 2 or grade 3 glioma with a median survival higher than Y years,
[0307] V₂i corresponds to the shrunken centroïd value for said gene i obtained from control patients having a WHO grade 2 or grade 3 glioma with a median survival lower than Y years,
[0308] T1 corresponds to the baseline value for control patients having a WHO grade 2 or grade 3 glioma with a median survival higher than Y years, and
[0309] T2 corresponds to the baseline value for control having a WHO grade 2 or grade 3 glioma with a median survival lower than Y years.

[0310] According to the invention, the formula disclosed above can be expressed as follows, when Qri is measured by PCR:

$$N 1 = {\sum }_{i = 1}^{n} ( {P}_{1} i ) - {T}_{1} = ( {\sum }_{i = 1}^{n} ( ( \frac{\begin{matrix}{log}_{2} ( \frac{Si}{Sc} \times 1000 ) - \frac{1}{size ( training )} \times \\ {\sum }_{training} {log}_{2} ( \frac{Si ( training )}{Sc} \times 1000 )\end{matrix}}{Ji} ) \times {V}_{1} i ) ) - {T}_{1} ,$$

n which will preferably vary from 3 to 22, and

$$N 2 = {\sum }_{i = 1}^{n} ( {P}_{2} i ) - {T}_{2} = ( {\sum }_{i = 1}^{n} ( ( \frac{\begin{matrix}{log}_{2} ( \frac{Si}{Sc} \times 1000 ) - \frac{1}{size ( training )} \times \\ {\sum }_{training} {log}_{2} ( \frac{Si ( training )}{Sc} \times 1000 )\end{matrix}}{Ji} ) \times {V}_{2} i ) ) - T 2 , n$$

which will preferably vary from 3 to 22,
wherein
[0311] Qri represents the quantitative raw expression value measured for a gene i in the biological sample of said subject, and
[0312] Qci represents the mean of the quantitative expression values obtained for said gene i from each patient of said control cohort of patient afflicted by a WHO grade 2 or grade 3 glioma,
[0313] Ji represents the standard deviation of the shrunken centroid values obtained for said gene i from each patient of said control cohort of patient afflicted by a WHO grade 2 or grade 3 glioma,
[0314] V₁i corresponds to the shrunken centroïd value for said gene i obtained from control patients having a WHO grade 2 or grade 3 glioma with a median survival higher than Y years,
[0315] V₂i corresponds to the shrunken centroïd value for said gene i obtained from control patients having a WHO grade 2 or grade 3 glioma with a median survival lower than Y years,
[0316] T₁ corresponds to the training baseline value for control patients having a WHO grade 2 or grade 3 glioma with a median survival higher than Y years, and
[0317] T₂ corresponds to the training baseline value for control having a WHO grade 2 or grade 3 glioma with a median survival lower than Y years.

[0318] In still another embodiment, the invention relates to the method as defined above, wherein, when the quantitative technique is qRT-PCR, Qci values for a gene i are as follows:

| Genes | Qci |
|---|---|
| SEQ ID NO: 1 | 9.8895 |
| SEQ ID NO: 2 | 10.7617 |
| SEQ ID NO: 3 | 4.8934 |
| SEQ ID NO: 4 | 8.6122 |
| SEQ ID NO: 5 | 10.0616 |
| SEQ ID NO: 6 | 9.1961 |
| SEQ ID NO: 7 | 7.0401 |
| SEQ ID NO: 8 | 6.7866 |
| SEQ ID NO: 9 | 7.4768 |
| SEQ ID NO: 10 | 8.4759 |
| SEQ ID NO: 11 | 8.4640 |
| SEQ ID NO: 12 | 5.5556 |
| SEQ ID NO: 13 | 9.2268 |
| SEQ ID NO: 14 | 7.4760 |
| SEQ ID NO: 15 | 16.4164 |
| SEQ ID NO: 16 | 7.4201 |
| SEQ ID NO: 17 | 11.9663 |
| SEQ ID NO: 18 | 11.3260 |
| SEQ ID NO: 19 | 9.2557 |
| SEQ ID NO: 20 | 8.4543 |
| SEQ ID NO: 21 | 6.9780 |
| SEQ ID NO: 22 | 7.2556 |

[0319] In one advantageous embodiment, the invention relates to the method as defined above, wherein, when the quantitative technique is qRT-PCR, Qci, Ji, V₁i, V₂i, T1 and T2 are as follows:
[0320] when the expression level of the genes SEQ ID NO: 1-3 is measured

| 3 genes | Qci | Ji | V1i | V2i | T1 | T2 |
|---|---|---|---|---|---|---|
| SEQ ID NO: 1 | 9.8895 | 3.5040 | −0.26557206 | 0.5975371 | 0.421766 | 1.4522384 |
| SEQ ID NO: 2 | 10.7617 | 2.8662 | −0.18905578 | 0.4253755 | | |
| SEQ ID NO: 3 | 4.8934 | 4.6331 | −0.04256449 | 0.0957701 | | |

[0321] when the expression level of the genes SEQ ID NO: 1-7 is measured

| 7 genes | Qci | Ji | V1i | V2i | T1 | T2 |
|---|---|---|---|---|---|---|
| SEQ ID NO: 1 | 9.8895 | 3.5040 | −0.309811118 | 0.697075015 | 0.4468138 | 1.5790433 |
| SEQ ID NO: 2 | 10.7617 | 2.8662 | −0.233294833 | 0.524913374 | | |
| SEQ ID NO: 3 | 4.8934 | 4.6331 | −0.086803548 | 0.195307982 | | |
| SEQ ID NO: 4 | 8.6122 | 2.5811 | −0.011870396 | 0.026708392 | | |
| SEQ ID NO: 5 | 10.0616 | 2.5943 | 0.008475628 | −0.019070162 | | |
| SEQ ID NO: 6 | 9.1961 | 3.4356 | −0.003268925 | 0.007355082 | | |
| SEQ ID NO: 7 | 7.0401 | 2.5542 | −0.003223563 | 0.007253016 | | |

[0322] when the expression level of the genes SEQ ID NO: 1-9 is measured

| 9 genes | Qci | Ji | V1i | V2i | T1 | T2 |
|---|---|---|---|---|---|---|
| SEQ ID NO: 1 | 9.8895 | 3.5040 | −0.331889301 | 0.746750927 | 0.4631175 | 1.6615805 |
| SEQ ID NO: 2 | 10.7617 | 2.8662 | −0.255373016 | 0.574589285 | | |
| SEQ ID NO: 3 | 4.8934 | 4.6331 | −0.10888173 | 0.244983893 | | |
| SEQ ID NO: 4 | 8.6122 | 2.5811 | −0.033948579 | 0.076384303 | | |
| SEQ ID NO: 5 | 10.0616 | 2.5943 | 0.03055381 | −0.068746073 | | |
| SEQ ID NO: 6 | 9.1961 | 3.4356 | −0.025347108 | 0.057030993 | | |
| SEQ ID NO: 7 | 7.0401 | 2.5542 | −0.025301745 | 0.056928927 | | |
| SEQ ID NO: 8 | 6.7866 | 3.1202 | −0.013802309 | 0.031055196 | | |
| SEQ ID NO: 9 | 7.4768 | 2.7594 | −0.002251371 | 0.005065584 | | |

[0323] when the expression level of the genes SEQ ID NO: 1-10 is measured

| 10 genes | Qci | Ji | V1i | V2i | T1 | T2 |
|---|---|---|---|---|---|---|
| SEQ ID NO: 1 | 9.8895 | 3.5040 | −0.37621105 | 0.84647485 | 0.509496 | 1.896372 |
| SEQ ID NO: 2 | 10.7617 | 2.8662 | −0.29969476 | 0.67431321 | | |
| SEQ ID NO: 3 | 4.8934 | 4.6331 | −0.15320348 | 0.34470782 | | |
| SEQ ID NO: 4 | 8.6122 | 2.5811 | −0.07827032 | 0.17610823 | | |
| SEQ ID NO: 5 | 10.0616 | 2.5943 | 0.07487556 | −0.16847 | | |
| SEQ ID NO: 6 | 9.1961 | 3.4356 | −0.06966885 | 0.15675492 | | |
| SEQ ID NO: 7 | 7.0401 | 2.5542 | −0.06962349 | 0.15665285 | | |
| SEQ ID NO: 8 | 6.7866 | 3.1202 | −0.05812405 | 0.13077912 | | |
| SEQ ID NO: 9 | 7.4768 | 2.7594 | −0.04657312 | 0.10478951 | | |
| SEQ ID NO: 10 | 8.4759 | 2.9469 | −0.04169181 | 0.09380658 | | |

[0324] when the expression level of the genes SEQ ID NO: 1-16 is measured

| 16 genes | Qci | Ji | V1i | V2i | T1 | T2 |
|---|---|---|---|---|---|---|
| SEQ ID NO: 1 | 9.8895 | 3.5040 | −0.398289229 | 0.896150764 | 0.540277 | 2.052201 |
| SEQ ID NO: 2 | 10.7617 | 2.8662 | −0.321772944 | 0.723989123 | | |
| SEQ ID NO: 3 | 4.8934 | 4.6331 | −0.175281658 | 0.394383731 | | |
| SEQ ID NO: 4 | 8.6122 | 2.5811 | −0.100348507 | 0.225784141 | | |
| SEQ ID NO: 5 | 10.0616 | 2.5943 | 0.096953738 | −0.218145911 | | |
| SEQ ID NO: 6 | 9.1961 | 3.4356 | −0.091747036 | 0.206430831 | | |
| SEQ ID NO: 7 | 7.0401 | 2.5542 | −0.091701673 | 0.206328765 | | |
| SEQ ID NO: 8 | 6.7866 | 3.1202 | −0.080202237 | 0.180455034 | | |
| SEQ ID NO: 9 | 7.4768 | 2.7594 | −0.068651299 | 0.154465422 | | |
| SEQ ID NO: 10 | 8.4759 | 2.9469 | −0.063769996 | 0.143482491 | | |
| SEQ ID NO: 11 | 8.4640 | 2.1597 | −0.020277623 | 0.045624651 | | |
| SEQ ID NO: 12 | 5.5556 | 2.3964 | −0.01079938 | 0.024298604 | | |
| SEQ ID NO: 13 | 9.2268 | 3.1865 | 0.008786792 | −0.019770281 | | |
| SEQ ID NO: 14 | 7.4760 | 2.6144 | −0.006607988 | 0.014867974 | | |
| SEQ ID NO: 15 | 16.4164 | 2.8714 | −0.006204653 | 0.013960469 | | |
| SEQ ID NO: 16 | 7.4201 | 3.3385 | −0.003597575 | 0.008094544 | | |

[0325] when the expression level of the genes SEQ ID NO: 1-22 is measured

| 22 genes | Qci | Ji | V1i | V2i | T1 | T2 |
|---|---|---|---|---|---|---|
| SEQ ID NO: 1 | 9.8895 | 3.5040 | −0.442610974 | 0.995874691 | 0.6255484 | 2.4838871 |
| SEQ ID NO: 2 | 10.7617 | 2.8662 | −0.366094689 | 0.82371305 | | |
| SEQ ID NO: 3 | 4.8934 | 4.6331 | −0.219603403 | 0.494107658 | | |
| SEQ ID NO: 4 | 8.6122 | 2.5811 | −0.144670252 | 0.325508068 | | |
| SEQ ID NO: 5 | 10.0616 | 2.5943 | 0.141275483 | −0.317869838 | | |
| SEQ ID NO: 6 | 9.1961 | 3.4356 | −0.136068781 | 0.306154758 | | |
| SEQ ID NO: 7 | 7.0401 | 2.5542 | −0.136023419 | 0.306052692 | | |
| SEQ ID NO: 8 | 6.7866 | 3.1202 | −0.124523982 | 0.28017896 | | |
| SEQ ID NO: 9 | 7.4768 | 2.7594 | −0.112973044 | 0.254189348 | | |
| SEQ ID NO: 10 | 8.4759 | 2.9469 | −0.108091741 | 0.243206417 | | |
| SEQ ID NO: 11 | 8.4640 | 2.1597 | −0.064599368 | 0.145348578 | | |
| SEQ ID NO: 12 | 5.5556 | 2.3964 | −0.055121125 | 0.124022531 | | |
| SEQ ID NO: 13 | 9.2268 | 3.1865 | 0.053108537 | −0.119494208 | | |
| SEQ ID NO: 14 | 7.4760 | 2.6144 | −0.050929734 | 0.114591901 | | |
| SEQ ID NO: 15 | 16.4164 | 2.8714 | −0.050526398 | 0.113684396 | | |
| SEQ ID NO: 16 | 7.4201 | 3.3385 | −0.04791932 | 0.107818471 | | |
| SEQ ID NO: 17 | 11.9663 | 3.4954 | 0.030451917 | −0.068516814 | | |
| SEQ ID NO: 18 | 11.3260 | 2.2250 | −0.029802867 | 0.067056452 | | |
| SEQ ID NO: 19 | 9.2557 | 3.1583 | −0.014836187 | 0.033381421 | | |
| SEQ ID NO: 20 | 8.4543 | 2.5087 | −0.010433641 | 0.023475692 | | |
| SEQ ID NO: 21 | 6.9780 | 4.4847 | −0.002903001 | 0.006531752 | | |
| SEQ ID NO: 22 | 7.2556 | 2.6921 | −0.002374696 | 0.005343066 | | |

[0326] The above matrices are appropriate to carry out the method according to the invention, when the prognosis of a patient, for which the expression level of said at least 3 genes according to the invention has been quantified by qRT-PCR, is evaluated.

[0327] The above values correspond to the values obtained for a determined cohort of reference patients having a WHO grade 2 or grade 3 glioma.

[0328] Applying the method disclosed in the Example, the skilled person could easily obtain similar results from any other determined cohort.

[0329] In still another embodiment, the invention relates to the method as defined above, wherein, when the quantitative technique is DNA CHIP, Qci values for a gene i are as follows:

| Genes | Qci |
|---|---|
| SEQ ID NO: 1 | 8.1111 |
| SEQ ID NO: 2 | 8.6287 |
| SEQ ID NO: 3 | 6.0748 |
| SEQ ID NO: 4 | 7.2020 |
| SEQ ID NO: 5 | 9.2810 |
| SEQ ID NO: 6 | 9.1734 |
| SEQ ID NO: 7 | 5.0310 |
| SEQ ID NO: 8 | 5.1660 |
| SEQ ID NO: 9 | 5.1174 |
| SEQ ID NO: 10 | 6.3898 |
| SEQ ID NO: 11 | 8.8992 |
| SEQ ID NO: 12 | 2.2380 |
| SEQ ID NO: 13 | 6.9486 |
| SEQ ID NO: 14 | 6.6286 |
| SEQ ID NO: 15 | 13.6886 |
| SEQ ID NO: 16 | 9.2036 |
| SEQ ID NO: 17 | 8.5740 |
| SEQ ID NO: 18 | 10.7286 |
| SEQ ID NO: 19 | 4.8529 |
| SEQ ID NO: 20 | 8.0629 |
| SEQ ID NO: 21 | 4.8347 |
| SEQ ID NO: 22 | 6.3091 |

[0330] In still another embodiment, the invention relates to the method as defined above, wherein, when the quantitative technique is DNA CHIP, Qci, Ji, V₁i, V₂i, T1 and T2 are as follows:
[0331] when the expression level of the genes SEQ ID NO: 1-3 is measured

| 3 genes | Qci | Ji | V1i | V2i | T1 | T2 |
|---|---|---|---|---|---|---|
| SEQ ID NO: 1 | 8.1111 | 3.5040 | −0.26557206 | 0.5975371 | 0.421766 | 1.4522384 |
| SEQ ID NO: 2 | 8.6287 | 2.8662 | −0.18905578 | 0.4253755 | | |
| SEQ ID NO: 3 | 6.0748 | 4.6331 | −0.04256449 | 0.0957701 | | |

[0332] when the expression level of the genes SEQ ID NO: 1-7 is measured

| 7 genes | Qci | Ji | V1i | V2i | T1 | T2 |
|---|---|---|---|---|---|---|
| SEQ ID NO: 1 | 8.1111 | 3.5040 | −0.309811118 | 0.697075015 | 0.4468138 | 1.5790433 |
| SEQ ID NO: 2 | 8.6287 | 2.8662 | −0.233294833 | 0.524913374 | | |
| SEQ ID NO: 3 | 6.0748 | 4.6331 | −0.086803548 | 0.195307982 | | |
| SEQ ID NO: 4 | 7.2020 | 2.5811 | −0.011870396 | 0.026708392 | | |
| SEQ ID NO: 5 | 9.2810 | 2.5943 | 0.008475628 | −0.019070162 | | |
| SEQ ID NO: 6 | 9.1734 | 3.4356 | −0.003268925 | 0.007355082 | | |
| SEQ ID NO: 7 | 5.0310 | 2.5542 | −0.003223563 | 0.007253016 | | |

| 9 genes | Qci | Ji | V1i | V2i | T1 | T2 |
|---|---|---|---|---|---|---|
| SEQ ID NO: 1 | 8.1111 | 3.5040 | −0.331889301 | 0.746750927 | 0.4631175 | 1.6615805 |
| SEQ ID NO: 2 | 8.6287 | 2.8662 | −0.255373016 | 0.574589285 | | |
| SEQ ID NO: 3 | 6.0748 | 4.6331 | −0.10888173 | 0.244983893 | | |
| SEQ ID NO: 4 | 7.2020 | 2.5811 | −0.033948579 | 0.076384303 | | |
| SEQ ID NO: 5 | 9.2810 | 2.5943 | 0.03055381 | −0.068746073 | | |
| SEQ ID NO: 6 | 9.1734 | 3.4356 | −0.025347108 | 0.057030993 | | |
| SEQ ID NO: 7 | 5.0310 | 2.5542 | −0.025301745 | 0.056928927 | | |
| SEQ ID NO: 8 | 5.1660 | 3.1202 | −0.013802309 | 0.031055196 | | |
| SEQ ID NO: 9 | 5.1174 | 2.7594 | −0.002251371 | 0.005065584 | | |

[0333] when the expression level of the genes SEQ ID NO: 1-9 is measured

| 10 genes | Qci | Ji | V1i | V2i | T1 | T2 |
|---|---|---|---|---|---|---|
| SEQ ID NO: 1 | 8.1111 | 3.5040 | −0.37621105 | 0.84647485 | 0.509496 | 1.896372 |
| SEQ ID NO: 2 | 8.6287 | 2.8662 | −0.29969476 | 0.67431321 | | |
| SEQ ID NO: 3 | 6.0748 | 4.6331 | −0.15320348 | 0.34470782 | | |
| SEQ ID NO: 4 | 7.2020 | 2.5811 | −0.07827032 | 0.17610823 | | |
| SEQ ID NO: 5 | 9.2810 | 2.5943 | 0.07487556 | −0.16847 | | |
| SEQ ID NO: 6 | 9.1734 | 3.4356 | −0.06966885 | 0.15675492 | | |
| SEQ ID NO: 7 | 5.0310 | 2.5542 | −0.06962349 | 0.15665285 | | |
| SEQ ID NO: 8 | 5.1660 | 3.1202 | −0.05812405 | 0.13077912 | | |
| SEQ ID NO: 9 | 5.1174 | 2.7594 | −0.04657312 | 0.10478951 | | |
| SEQ ID NO: 10 | 6.3898 | 2.9469 | −0.04169181 | 0.09380658 | | |

[0334] when the expression level of the genes SEQ ID NO: 1-16 is measured

| 16 genes | Qci | Ji | V1i | V2i | T1 | T2 |
|---|---|---|---|---|---|---|
| SEQ ID NO: 1 | 8.1111 | 3.5040 | −0.398289229 | 0.896150764 | 0.540277 | 2.052201 |
| SEQ ID NO: 2 | 8.6287 | 2.8662 | −0.321772944 | 0.723989123 | | |
| SEQ ID NO: 3 | 6.0748 | 4.6331 | −0.175281658 | 0.394383731 | | |
| SEQ ID NO: 4 | 7.2020 | 2.5811 | −0.100348507 | 0.225784141 | | |
| SEQ ID NO: 5 | 9.2810 | 2.5943 | 0.096953738 | −0.218145911 | | |
| SEQ ID NO: 6 | 9.1734 | 3.4356 | −0.091747036 | 0.206430831 | | |
| SEQ ID NO: 7 | 5.0310 | 2.5542 | −0.091701673 | 0.206328765 | | |
| SEQ ID NO: 8 | 5.1660 | 3.1202 | −0.080202237 | 0.180455034 | | |
| SEQ ID NO: 9 | 5.1174 | 2.7594 | −0.068651299 | 0.154465422 | | |
| SEQ ID NO: 10 | 6.3898 | 2.9469 | −0.063769996 | 0.143482491 | | |
| SEQ ID NO: 11 | 8.8992 | 2.1597 | −0.020277623 | 0.045624651 | | |
| SEQ ID NO: 12 | 2.2380 | 2.3964 | −0.01079938 | 0.024298604 | | |
| SEQ ID NO: 13 | 6.9486 | 3.1865 | 0.008786792 | −0.019770281 | | |
| SEQ ID NO: 14 | 6.6286 | 2.6144 | −0.006607988 | 0.014867974 | | |
| SEQ ID NO: 15 | 13.6886 | 2.8714 | −0.006204653 | 0.013960469 | | |
| SEQ ID NO: 16 | 9.2036 | 3.3385 | −0.003597575 | 0.008094544 | | |

[0335] when the expression level of the genes SEQ ID NO: 1-22 is measured

| 22 genes | Qci | Ji | V1i | V2i | T1 | T2 |
|---|---|---|---|---|---|---|
| SEQ ID NO: 1 | 8.1111 | 3.5040 | −0.442610974 | 0.995874691 | 0.6255484 | 2.4838871 |
| SEQ ID NO: 2 | 8.6287 | 2.8662 | −0.366094689 | 0.82371305 | | |
| SEQ ID NO: 3 | 6.0748 | 4.6331 | −0.219603403 | 0.494107658 | | |
| SEQ ID NO: 4 | 7.2020 | 2.5811 | −0.144670252 | 0.325508068 | | |
| SEQ ID NO: 5 | 9.2810 | 2.5943 | 0.141275483 | −0.317869838 | | |
| SEQ ID NO: 6 | 9.1734 | 3.4356 | −0.136068781 | 0.306154758 | | |
| SEQ ID NO: 7 | 5.0310 | 2.5542 | −0.136023419 | 0.306052692 | | |
| SEQ ID NO: 8 | 5.1660 | 3.1202 | −0.124523982 | 0.28017896 | | |
| SEQ ID NO: 9 | 5.1174 | 2.7594 | −0.112973044 | 0.254189348 | | |
| SEQ ID NO: 10 | 6.3898 | 2.9469 | −0.108091741 | 0.243206417 | | |
| SEQ ID NO: 11 | 8.8992 | 2.1597 | −0.064599368 | 0.145348578 | | |
| SEQ ID NO: 12 | 2.2380 | 2.3964 | −0.055121125 | 0.124022531 | | |
| SEQ ID NO: 13 | 6.9486 | 3.1865 | 0.053108537 | −0.119494208 | | |
| SEQ ID NO: 14 | 6.6286 | 2.6144 | −0.050929734 | 0.114591901 | | |
| SEQ ID NO: 15 | 13.6886 | 2.8714 | −0.050526398 | 0.113684396 | | |
| SEQ ID NO: 16 | 9.2036 | 3.3385 | −0.04791932 | 0.107818471 | | |
| SEQ ID NO: 17 | 8.5740 | 3.4954 | 0.030451917 | −0.068516814 | | |
| SEQ ID NO: 18 | 10.7286 | 2.2250 | −0.029802867 | 0.067056452 | | |
| SEQ ID NO: 19 | 4.8529 | 3.1583 | −0.014836187 | 0.033381421 | | |
| SEQ ID NO: 20 | 8.0629 | 2.5087 | −0.010433641 | 0.023475692 | | |
| SEQ ID NO: 21 | 4.8347 | 4.4847 | −0.002903001 | 0.006531752 | | |
| SEQ ID NO: 22 | 6.3091 | 2.6921 | −0.002374696 | 0.005343066 | | |

[0336] The above matrices are appropriate to carry out the method according to the invention, when the prognosis of a patient, for which the expression level of said at least 3 genes according to the invention has been quantified by DNA CHIP, is evaluated.

[0337] The above values correspond to the values obtained for a determined cohort of reference patients having a WHO grade 2 or grade 3 glioma.

[0338] Applying the method disclosed in the Example, the skilled person could easily obtain similar results from any other determined cohort.

[0339] Certain preferred aspects and embodiments of the present invention will now be discussed in more detail:

### Direct Methods of Determining Quantitative Expression

[0340] More advantageously, the invention relates to the method previously defined, wherein the expression level of the genes is measured by a method allowing the determination of the amount of the mRNA or of the cDNA corresponding to said genes. Preferably said method is a quantitative method.

[0341] Levels of mRNA can be quantitatively measured by northern blotting which gives size and sequence information about the mRNA molecules. A sample of RNA is separated on an agarose gel and hybridized to a radio-labeled RNA probe that is complementary to the target sequence. The radio-labeled RNA is then detected by an autoradiograph. Northern blotting is widely used as the additional mRNA size information allows the discrimination of alternately spliced transcripts.

[0342] Another approach for measuring mRNA abundance is reverse transcription quantitative polymerase chain reaction (RT-PCR followed with qPCR). RT-PCR first generates a DNA template from the mRNA by reverse transcription, which is called cDNA. This cDNA template is then used for qPCR where the change in fluorescence of a probe changes as the DNA amplification process progresses. With a carefully constructed standard curve qPCR can produce an absolute measurement such as number of copies of mRNA, typically in units of copies per nanolitre of homogenized tissue or copies per cell. qPCR is very sensitive (detection of a single mRNA molecule is possible), but can be expensive due to the fluorescent probes required.

[0343] Northern blots and RT-qPCR are good for detecting whether a single gene or few genes are expressed.

[0344] Other methods known by one skilled in the art include DNA microarrays or technologies like Serial Analysis of Gene Expression (SAGE).

[0345] SAGE can provide a relative measure of the cellular concentration of different messenger RNAs. The great advantage of tag-based methods is the “open architecture”, allowing for the exact measurement of any transcript are present in cells, the sequence of said transcripts could be known or unknown.

[0346] In one another advantageous embodiment, the invention relates to the method defined above, wherein the expression level (e.g. quantitative expression value Qi) for a gene i is measured by any quantitative techniques like qRT-PCR or DNA Chip.

[0347] More preferably, the invention relates to the method defined above, wherein expression level (e.g. the quantitative expression value Qi) for a gene i is measured by a quantitative technique chosen among qRT-PCR and DNA Chip

[0348] The preferred quantitative techniques used to establish the expression level (e.g. quantitative value Qi) are qRT-PCR (hereafter qPCR) and DNA CHIP

[0349] qPCR is well known in the art, and can be carried out by using, in association with oligonucleotides allowing a specific amplification of the target gene, either with dyes or with reporter probe.

[0350] Both techniques are briefly summarized hereafter.

[0351] Real-Time PCR with Double-Stranded DNA-Binding Dyes as Reporters:

[0352] A DNA-binding dye binds to all double-stranded (ds)DNA in PCR, causing fluorescence of the dye. An increase in DNA product during PCR therefore leads to an increase in fluorescence intensity and is measured at each cycle, thus allowing DNA concentrations to be quantified.

[0353] However, dsDNA dyes such as SYBR Green will bind to all dsDNA PCR products, including nonspecific PCR products (such as Primer dimer). This can potentially interfere with or prevent accurate quantification of the intended target sequence.

[0354] The reaction is prepared as usual, with the addition of fluorescent dsDNA dye.

[0355] The reaction is run in a Real-time PCR instrument, and after each cycle, the levels of fluorescence are measured with a detector; the dye only fluoresces when bound to the dsDNA (i.e., the PCR product). With reference to a standard dilution, the dsDNA concentration in the PCR can be determined.

[0356] Like other real-time PCR methods, the values obtained do not have absolute units associated with them (i.e., mRNA copies/cell). As described above, a comparison of a measured DNA/RNA sample to a standard dilution will only give a fraction or ratio of the sample relative to the standard, allowing only relative comparisons between different tissues or experimental conditions. To ensure accuracy in the quantification, it is usually necessary to normalize expression of a target gene to a stably expressed gene (see below). This can correct possible differences in RNA quantity or quality across experimental samples.

[0357] Fluorescent Reporter Probe Method

[0358] Fluorescent reporter probes detect only the DNA containing the probe sequence; therefore, use of the reporter probe significantly increases specificity, and enables quantification even in the presence of non-specific DNA amplification. Fluorescent probes can be used in multiplex assays—for detection of several genes in the same reaction—based on specific probes with different-coloured labels, provided that all targeted genes are amplified with similar efficiency. The specificity of fluorescent reporter probes also prevents interference of measurements caused by primer dimers, which are undesirable potential by-products in PCR. However, fluorescent reporter probes do not prevent the inhibitory effect of the primer dimers, which may depress accumulation of the desired products in the reaction.

[0359] The method relies on a DNA-based probe with a fluorescent reporter at one end and a quencher of fluorescence at the opposite end of the probe. The close proximity of the reporter to the quencher prevents detection of its fluorescence; breakdown of the probe by the 5′ to 3′ exonuclease activity of the Taq polymerase breaks the reporter-quencher proximity and thus allows unquenched emission of fluorescence, which can be detected after excitation with a laser. An increase in the product targeted by the reporter probe at each PCR cycle therefore causes a proportional increase in fluorescence due to the breakdown of the probe and release of the reporter.

[0360] The PCR is prepared as usual, and the reporter probe is added.

[0361] During the annealing stage of the PCR both probe and primers anneal to the DNA target.

[0362] Polymerisation of a new DNA strand is initiated from the primers, and once the polymerase reaches the probe, its 5′-3′-exonuclease degrades the probe, physically separating the fluorescent reporter from the quencher, resulting in an increase in fluorescence.

[0363] Fluorescence is detected and measured in the real-time PCR thermocycler, and its geometric increase corresponding to exponential increase of the product is used to determine the threshold cycle (CT) in each reaction.

### Indirect Methods of Determining Quantitative Expression

[0364] In one embodiment the determining expression comprises contacting said sample with at least one antibody specific to a polypeptide (“target protein”) encoded by the relevant gene or a fragment thereof.

[0365] In one aspect of the present invention, the target protein can be detected using a binding moiety capable of specifically binding the marker protein. By way of example, the binding moiety may comprise a member of a ligand-receptor pair, i.e. a pair of molecules capable of having a specific binding interaction. The binding moiety may comprise, for example, a member of a specific binding pair, such as antibody-antigen, enzyme-substrate, nucleic acid-nucleic acid, protein-nucleic acid, protein-protein, or other specific binding pair known in the art. Binding proteins may be designed which have enhanced affinity for the target protein of the invention. Optionally, the binding moiety may be linked with a detectable label, such as an enzymatic, fluorescent, radioactive, phosphorescent, coloured particle label or spin label. The labelled complex may be detected, for example, visually or with the aid of a spectrophotometer or other detector.

[0366] A preferred embodiment of the present invention involves the use of a recognition agent, for example an antibody recognising the target protein of the invention, to con-tact a sample of glioma, and quantifying the response. Quantitative methods are well known to those skilled in the art and include radio-immunological methods or enzyme-linked antibody methods.

[0367] More specifically, examples of immunoassays are antibody capture assays, two-antibody sandwich assays, and antigen capture assays. In a sandwich immunoassay, two antibodies capable of binding the marker protein generally are used, e.g. one immobilised onto a solid support, and one free in solution and labelled with a detectable chemical compound. Examples of chemical labels that may be used for the second antibody include radioisotopes, fluorescent compounds, spin labels, coloured particles such as colloidal gold and coloured latex, and enzymes or other molecules that generate coloured or electrochemically active products when exposed to a reactant or enzyme substrate. When a sample containing the marker protein is placed in this system, the marker protein binds to both the immobilised antibody and the labelled antibody, to form a “sandwich” immune complex on the support's surface. The complexed protein is detected by washing away non-bound sample components and excess labelled antibody, and measuring the amount of labelled antibody complexed to protein on the support's surface. Alternatively, the antibody free in solution, which can be labelled with a chemical moiety, for example, a hapten, may be detected by a third antibody labelled with a detectable moiety which binds the free antibody or, for example, the hapten coupled thereto. Preferably, the immunoassay is a solid support-based immunoassay. Alternatively, the immunoassay may be one of the immunoprecipitation techniques known in the art, such as, for example, a nephelometric immunoassay or a turbidimetric immunoassay. When Western blot analysis or an immunoassay is used, preferably it includes a conjugated enzyme labelling technique.

[0368] Although the recognition agent will conveniently be an antibody, other recognition agents are known or may become available, and can be used in the present invention. For example, antigen binding domain fragments of antibodies, such as Fab fragments, can be used. Also, so-called RNA aptamers may be used. Therefore, unless the context specifically indicates otherwise, the term “antibody” as used herein is intended to include other recognition agents. Where antibodies are used, they may be polyclonal or monoclonal. Optionally, the antibody can be produced by a method such that it recognizes a preselected epitope from the target protein of the invention.

### Other Aspects and Embodiments

[0369] The invention also relates to a composition comprising oligonucleotides allowing the quantitative measure of the expression level of the genes of a set comprising at least 3 genes belonging to a group of 22 genes, said 22 genes comprising or being constituted by the respective nucleic acid sequences SEQ ID NO: 1 to 22,

wherein said at least 3 genes optionally comprise or are constituted by the respective nucleic acid sequences SEQ ID NO: 1 to 3,
said composition preferably consisting essentially of 1 to 20 oligonucleotides allowing the measure of the expression level of essentially at least the genes of a set comprising at least 3 genes belonging to a group of 22 genes,
for its use for determining, in vitro or ex vivo, from a biological sample of a subject afflicted by a WHO grade 2 or grade 3 glioma, the survival prognosis of said subject.

[0370] The composition according to the invention, as mentioned above, consists of pools, said pools consisting of 1, or 2 or 3, or 3 or 4 or 5 or 6 or 7 or 8 or 9 or 10 or 11 or 12 or 13 or 14 or 15 or 16 or 17 or 18 or 19 or 20 oligonucleotides that specifically hybridize with one gene of the group of 22 genes, said composition containing at least 3 pools.

[0371] As mentioned above, the composition consists of at least 3 pools, i.e. consists of 3, or 4, or 5, or 6, or 7, or 8, or 9, or 10, or 11, or, 12, or 13, or 14, or 15, or 16, or 17, or 18, or 19, or 20, or 21, or 22 pools, each pools consisting of 1, or 2 or 3, or 3 or 4 or 5 or 6 or 7 or 8 or 9 or 10 or 11 or 12 or 13 or 14 or 15 or 16 or 17 or 18 or 19 or 20 oligonucleotides that specifically hybridize with one gene of the group of 22 genes, the oligonucleotides comprised in each pool are not able to hybridize with the gene recognized by the oligonucleotides of another pool.

[0372] In other words, the composition according to the invention consists, in its minimal configuration, of at least 3 pools: a pool of oligonucleotides specifically hybridizing with the gene SEQ ID NO: 1, a pool of oligonucleotides specifically hybridizing with the gene SEQ ID NO: 2 and a pool of oligonucleotides specifically hybridizing with the gene SEQ ID NO: 3.

[0373] The oligonucleotides comprised in each pool, and that are specific of one of said at least 3 genes of the group of 22 genes, can be easily determined by the skilled person, since the nucleic acid sequence of each of the genes is known.

[0374] The structure of the nucleotide depends upon the technique which will be carried out to implement the method according to the invention.

[0375] For instance, if the method implements a qRT-PCR, each pool is preferably constituted by a couple of oligonucleotides consisting of 15-35 nucleotides, said oligonucleotides being reverse and anti-parallel, in order to carry out a PCR amplification. Advantageously, another oligonucleotide can be present, and will be used a probe (such as Taqman probe), said probe being used as quantifying indicator during the PCR amplification.

[0376] If the method is a DNA CHIP, each pool is preferably constituted by 5 to 15 oligonucleotides consisting of 15-60 nucleotides.

[0377] In one advantageous embodiment, the oligonucleotide probes used in the invention are the following ones:

| gene | Probe set number | Probe sequence | SEQ ID |
|---|---|---|---|
| CHI3L1 | HG-U133_PLUS_2: | TCACCAATGCCATCAAGGATGCACT | SEQ ID NO 89 |
| | 209396_S_AT | CAAGGATGCACTCGCTGCAACGTAG | SEQ ID NO 90 |
| | | CACACAGCACGGGGGCCAAGGATGC | SEQ ID NO 91 |
| | | TGCAGAGGTCCACAACACACAGATT | SEQ ID NO 92 |
| | | CACAGATTTGAGCTCAGCCCTGGTG | SEQ ID NO 93 |
| | | CCCTAGCCCTCCTTATCAAAGGACA | SEQ ID NO 94 |
| | | AAGGACACCATTTTGGCAAGCTCTA | SEQ ID NO 95 |
| | | GGCAAGCTCTATCACCAAGGAGCCA | SEQ ID NO 96 |
| | | ATCCTACAAGACACAGTGACCATAC | SEQ ID NO 97 |
| | | AGTGACCATACTAATTATACCCCCT | SEQ ID NO 98 |
| | | GCAAAGCCAGCTTGAAACCTTCACT | SEQ ID NO 99 |
| IGFBP2 | HG-U133_PLUS_2: | ATCCCCAACTGTGACAAGCATGGCC | SEQ ID NO 100 |
| | 202718_AT | TGACAAGCATGGCCTGTACAACCTC | SEQ ID NO 101 |
| | | GTACAACCTCAAACAGTGCAAGATG | SEQ ID NO 102 |
| | | GCAAGATGTCTCTGAACGGGCAGCG | SEQ ID NO 103 |
| | | ACGGGCAGCGTGGGGAGTGCTGGTG | SEQ ID NO 104 |
| | | GAACCCCAACACCGGGAAGCTGATC | SEQ ID NO 105 |
| | | CACCGGGAAGCTGATCCAGGGAGCC | SEQ ID NO 106 |
| | | CATCCGGGGGGACCCCGAGTGTCAT | SEQ ID NO 107 |
| | | GAGTGTCATCTCTTCTACAATGAGC | SEQ ID NO 108 |
| | | GCACACCCAGCGGATGCAGTAGACC | SEQ ID NO 109 |
| | | GAAAACGGAGAGTGCTTGGGTGGTG | SEQ ID NO 110 |
| POSTN | HG-U133_PLUS_2: | AAATTGTGGAGTTAGCCTCCTGTGG | SEQ ID NO 111 |
| | 210809_S_AT | GTGGAGTTAGCCTCCTGTGGTAAAG | SEQ ID NO 112 |
| | | TTACACCCTTTTTCATCTTGACATT | SEQ ID NO 113 |
| | | GTTCTGGCTAACTTTGGAATCCATT | SEQ ID NO 114 |
| | | AGAGTTGTGAACTGTTATCCCATTG | SEQ ID NO 115 |
| | | TTATCCCATTGAAAAGACCGAGCCT | SEQ ID NO 116 |
| | | GACCGAGCCTTGTATGTATGTTATG | SEQ ID NO 117 |
| | | AAATGCACGCAAGCCATTATCTCTC | SEQ ID NO 118 |
| | | AGCCATTATCTCTCCATGGGAAGCT | SEQ ID NO 119 |
| | | AGGCTTTGCACATTTCTATATGAGT | SEQ ID NO 120 |
| | | GTTTGTCATATGCTTCTTGCAATGC | SEQ ID NO 121 |
| HSPG2 | HG-U133_PLUS_2: | TCCCTCCCTCAGGGGCTGTAAGGGA | SEQ ID NO 122 |
| | 201655_S_AT | TCAGGGGCTGTAAGGGAAGGCCCAC | SEQ ID NO 123 |
| | | ACTCCTCCAACAGACAACGGACGGA | SEQ ID NO 124 |
| | | GACAACGGACGGACGGATGCCGCTG | SEQ ID NO 125 |
| | | ATGCCGCTGGTGCTCAGGAAGAGCT | SEQ ID NO 126 |
| | | GCTCAGGAAGAGCTAGTGCCTTAGG | SEQ ID NO 127 |
| | | GGAAGAGCTAGTGCCTTAGGTGGGG | SEQ ID NO 128 |
| | | AGAGCTAGTGCCTTAGGTGGGGGAA | SEQ ID NO 129 |
| | | GGAAGGCAGGACTCACGACTGAGAG | SEQ ID NO 130 |
| | | GGCAGGACTCACGACTGAGAGAGAG | SEQ ID NO 131 |
| | | GCCCCCAGACTGTGGGGTTGGGACG | SEQ ID NO 132 |
| BMP2 | HG-U133_PLUS_2: | TATCGGGTTTGTACATAATTTTCCA | SEQ ID NO 133 |
| | 205289_AT | AATTGTAGTTGTTTTCAGTTGTGTG | SEQ ID NO 134 |
| | | GGAAGGTTACTCTGGCAAAGTGCTT | SEQ ID NO 135 |
| | | GTTTGCTTTTTTGCAGTGCTACTGT | SEQ ID NO 136 |
| | | GTGCTACTGTTGAGTTCACAAGTTC | SEQ ID NO 137 |
| | | GTGGATAATCCACTCTGCTGACTTT | SEQ ID NO 138 |
| | | AGAACCAGACATTGCTGATCTATTA | SEQ ID NO 139 |
| | | CTATTATAGAAACTCTCCTCCTGCC | SEQ ID NO 140 |
| | | TCCTCCTGCCCCTTAATTTACAGAA | SEQ ID NO 141 |
| | | TTTCCTAAATTAGTGATCCCTTCAA | SEQ ID NO 142 |
| | | GGGGCTGATCTGGCCAAAGTATTCA | SEQ ID NO 143 |
| COL1A1 | HG-U133_PLUS_2: | TGGGAGACAATTTCACATGGACTTT | SEQ ID NO 144 |
| | 1556499_s_at | GAGACAATTTCACATGGACTTTGGA | SEQ ID NO 145 |
| | | ACAATTTCACATGGACTTTGGAAAA | SEQ ID NO 146 |
| | | TTCCTTTGCATTCATCTCTCAAACT | SEQ ID NO 147 |
| | | TCCTTTGCATTCATCTCTCAAACTT | SEQ ID NO 148 |
| | | TTTGCATTCATCTCTCAAACTTAGT | SEQ ID NO 149 |
| | | TGCATTCATCTCTCAAACTTAGTTT | SEQ ID NO 150 |
| | | CATTCATCTCTCAAACTTAGTTTTT | SEQ ID NO 151 |
| | | ATCTCTCAAACTTAGTTTTTATCTT | SEQ ID NO 152 |
| | | TTTTTATCTTTGACCAACCGAACAT | SEQ ID NO 153 |
| | | TTTATCTTTGACCAACCGAACATGA | SEQ ID NO 154 |
| NEK2 | HG-U133_PLUS_2: | GCTGTAGTGTTGAATACTTGGCCCC | SEQ ID NO 155 |
| | 204641_AT | TGAATACTTGGCCCCATGAGCCATG | SEQ ID NO 156 |
| | | GCCATGCCTTTCTGTATAGTACACA | SEQ ID NO 157 |
| | | GATATTTCGGAATTGGTTTTACTGT | SEQ ID NO 158 |
| | | TTGGTTGGGCTTTTAATCCTGTGTG | SEQ ID NO 159 |
| | | GTAGCACTCACTGAATAGTTTTAAA | SEQ ID NO 160 |
| | | GGTATGCTTACAATTGTCATGTCTA | SEQ ID NO 161 |
| | | ATTAATACCATGACATCTTGCTTAT | SEQ ID NO 162 |
| | | AAATATTCCATTGCTCTGTAGTTCA | SEQ ID NO 163 |
| | | CTCTGTAGTTCAAATCTGTTAGCTT | SEQ ID NO 164 |
| | | TGAGCTGTCTGTCATTTACCTACTT | SEQ ID NO 165 |
| DLG7 | HG-U133_PLUS_2: | GTGAGAGAATGAGTTTGCCTCTTCT | SEQ ID NO 166 |
| | 203764_AT | GGATGTTTTGATGAGTAGCCCTGAA | SEQ ID NO 167 |
| | | AAAGTCTCACTACTGAATGCCACCT | SEQ ID NO 168 |
| | | CCACCTTCTTGATTCACCAGGTCTA | SEQ ID NO 169 |
| | | GCAGTAATCCATTTACTCAGCTGGA | SEQ ID NO 170 |
| | | GAGACATCAAGAACATGCCAGACAC | SEQ ID NO 171 |
| | | ATGCCAGACACATTTCTTTTGGTGG | SEQ ID NO 172 |
| | | TGGTAACCTGATTACTTTTTCACCT | SEQ ID NO 173 |
| | | ACTTTTTCACCTCTACAACCAGGAG | SEQ ID NO 174 |
| | | ATTTGTGTTCACTTCTATAGCATAT | SEQ ID NO 175 |
| | | GATATACTCTTTCTCAAGGGAAGTG | SEQ ID NO 176 |
| FOXM1 | HG-U133_PLUS_2: | AGCTGACTTGGAAACACGGGGAGGT | SEQ ID NO 177 |
| | 214148_AT | CAAGCAGATCCACTTGTCTGGGTCC | SEQ ID NO 178 |
| | | GTCTGGGTCCCTGCAGTGAAGAACC | SEQ ID NO 179 |
| | | AGAACCCAAGATCCAGGTACCTCAG | SEQ ID NO 180 |
| | | AGAAACCGTGCACTGCAGGTCTTCC | SEQ ID NO 181 |
| | | ATTTCTTCCTCCTTGATAGTCTGAA | SEQ ID NO 182 |
| | | AGAAAGAGGAGCTATCCCCTCCTCA | SEQ ID NO 183 |
| | | CTCCTCAGCTAGCAGCACCTGAAAG | SEQ ID NO 184 |
| | | GAACCAACGGTCACCAGACAGGACG | SEQ ID NO 185 |
| | | ACATACGGGTTCTGATCCTCTTTGT | SEQ ID NO 186 |
| | | GATCCTCTTTGTGTCGTTTTGAAGT | SEQ ID NO 187 |
| BIRC5 | HG-U133_PLUS_2: | GCTCCTCTACTGTTTAACAACATGG | SEQ ID NO 188 |
| | 202095_S_AT | AAGCACAAAGCCATTCTAAGTCATT | SEQ ID NO 189 |
| | | GGAAGCGTCTGGCAGATACTCCTTT | SEQ ID NO 190 |
| | | TGGCAGATACTCCTTTTGCCACTGC | SEQ ID NO 191 |
| | | TGATTAGACAGGCCCAGTGAGCCGC | SEQ ID NO 192 |
| | | AATGACTTGGCTCGATGCTGTGGGG | SEQ ID NO 193 |
| | | TCACGTTCTCCACACGGGGGAGAGA | SEQ ID NO 194 |
| | | TCCCGCAGGGCTGAAGTCTGGCGTA | SEQ ID NO 195 |
| | | GATGATGGATTTGATTCGCCCTCCT | SEQ ID NO 196 |
| | | TACAGCTTCGCTGGAAACCTCTGGA | SEQ ID NO 197 |
| | | GGAAACCTCTGGAGGTCATCTCGGC | SEQ ID NO 198 |
| PLK1 | HG-U133_PLUS_2: | TGGGTTATGCCCAACATCTGCTTTC | SEQ ID NO 199 |
| | 1555900_AT | TGAGCAGCTCCCAATGAGAACCCTG | SEQ ID NO 200 |
| | | GAGAACCCTGAACACTGAGTCTGTA | SEQ ID NO 201 |
| | | AGTCTGTAATGAGCTTCCCTTGTAT | SEQ ID NO 202 |
| | | GAGCTTCCCTTGTATACAACATTGC | SEQ ID NO 203 |
| | | CAACATTGCACATGGGTTGTCACAA | SEQ ID NO 204 |
| | | GTCACAACTGATTGCTGGAGGAATT | SEQ ID NO 205 |
| | | AATTGTGTCCTATGTGACTCTGCTG | SEQ ID NO 206 |
| | | ACTGTGGGAGGCTTACACCTGGTTT | SEQ ID NO 207 |
| | | TGGACTTTGTCCATGCGCTTTTTTC | SEQ ID NO 208 |
| | | TTGCTGATTTTGCTTCCTAGCCTTT | SEQ ID NO 209 |
| NKX6-1 | HG-U133_PLUS_2: | TCTGGCCCGGAGTGATGCAGAGCCC | SEQ ID NO 210 |
| | 221366_AT | GTACCCCTCATCAAGGATCCATTTT | SEQ ID NO 211 |
| | | AGAGAAAACACACGAGACCCACTTT | SEQ ID NO 212 |
| | | TTTTTCCGGACAGCAGATCTTCGCC | SEQ ID NO 213 |
| | | TACTTGGCGGGGCCCGAGAGGGCTC | SEQ ID NO 214 |
| | | CTCGTTTGGCCTATTCGTTGGGGAT | SEQ ID NO 215 |
| | | GAGTCAGGTCAAGGTCTGGTTCCAG | SEQ ID NO 216 |
| | | GAAGCAGGACTCGGAGACAGAGCGC | SEQ ID NO 217 |
| | | GACTACAATAAGCCTCTGGATCCCA | SEQ ID NO 218 |
| | | GAAGAAGCACAAGTCCAGCAGCGGC | SEQ ID NO 219 |
| | | TCCGAGCCGGAGAGCTCATCCTGAA | SEQ ID NO 220 |
| NRG3 | HG-U133_PLUS_2: | CATGTGTTCATTGTGCGTATGTGTG | SEQ ID NO 221 |
| | 229233_AT | GTGCATGTGTGCGCGTATTACGCTT | SEQ ID NO 222 |
| | | TTACGCTTGCTAAAATTTGTTCTGA | SEQ ID NO 223 |
| | | AGGTCACTTGCATGGTGGGGTCGTA | SEQ ID NO 224 |
| | | GGTCGTATAAAACCCTTGACACTGT | SEQ ID NO 225 |
| | | GACACTGTCTAGACCATTTTCTGAT | SEQ ID NO 226 |
| | | GAGAGGATCAACTATTGGCTCATTA | SEQ ID NO 227 |
| | | TAGCAAGTCTGCTATGTGTGGACCA | SEQ ID NO 228 |
| | | GCTTCGGCTTCTGTGGTTAGTATGG | SEQ ID NO 229 |
| | | AATACCCAGACTATTCAGTTCACAA | SEQ ID NO 230 |
| | | CTATTCAGTTCACAAGAAGCCCCCC | SEQ ID NO 231 |
| BUB1B | HG-U133_PLUS_2: | TTCTTTGTGCGGATTCTGAATGCCA | SEQ ID NO 232 |
| | 203755_AT | TGGGGTTTTTGACACTACATTCCAA | SEQ ID NO 233 |
| | | GTTAACTAGTCCTGGGGCTTTGCTC | SEQ ID NO 234 |
| | | GGGGCTTTGCTCTTTCAGTGAGCTA | SEQ ID NO 235 |
| | | GAGCTAGGCAATCAAGTCTCACAGA | SEQ ID NO 236 |
| | | GTCTCACAGATTGCTGCCTCAGAGC | SEQ ID NO 237 |
| | | GGACACATTTAGATGCACTACCATT | SEQ ID NO 238 |
| | | CACTACCATTGCTGTTCTACTTTTT | SEQ ID NO 239 |
| | | GGTACAGGTATATTTTGACGTCACT | SEQ ID NO 240 |
| | | GGCCTTGTCTAACTTTTGTGAAGAA | SEQ ID NO 241 |
| | | GTTCTCTTATGATCACCATGTATTT | SEQ ID NO 242 |
| VIM | HG-U133_PLUS_2: | TGTGGATGTTTCCAAGCCTGACCTC | SEQ ID NO 243 |
| | 201426_S_AT | TGCCCTGCGTGACGTACGTCAGCAA | SEQ ID NO 244 |
| | | GTGTGGCTGCCAAGAACCTGCAGGA | SEQ ID NO 245 |
| | | AGTACCGGAGACAGGTGCAGTCCCT | SEQ ID NO 246 |
| | | GCAGTCCCTCACCTGTGAAGTGGAT | SEQ ID NO 247 |
| | | TGAGTCCCTGGAACGCCAGATGCGT | SEQ ID NO 248 |
| | | GAGAACTTTGCCGTTGAAGCTGCTA | SEQ ID NO 249 |
| | | GAAGCTGCTAACTACCAAGACACTA | SEQ ID NO 250 |
| | | CACTATTGGCCGCCTGCAGGATGAG | SEQ ID NO 251 |
| | | GTCACCTTCGTGAATACCAAGACCT | SEQ ID NO 252 |
| | | GCCCTTGACATTGAGATTGCCACCT | SEQ ID NO 253 |
| TNC | HG-U133_PLUS_2: | TTTTACCAAAGCATCAATACAACCA | SEQ ID NO 254 |
| | 201645_AT | CGGTCCACACCTGGGCATTTGGTGA | SEQ ID NO 255 |
| | | TCAAAGCTGACCATGGATCCCTGGG | SEQ ID NO 256 |
| | | TTGCACCAAAGACATCAGTCTCCAA | SEQ ID NO 257 |
| | | CATCAGTCTCCAACATGTTTCTGTT | SEQ ID NO 258 |
| | | ATCGCAATAGTTTTTTACTTCTCTT | SEQ ID NO 259 |
| | | TTACTTCTCTTAGGTGGCTCTGGGA | SEQ ID NO 260 |
| | | GAACCAGCCGTATTTTACATGAAGC | SEQ ID NO 261 |
| | | ATGTGTCATTGGAAGCCATCCCTTT | SEQ ID NO 262 |
| | | TCAAGAGATCTTTCTTTCCAAAACA | SEQ ID NO 263 |
| | | ACATTTCTGGACAGTACCTGATTGT | SEQ ID NO 264 |
| DLL3 | HG-U133_PLUS_2: | TCCCGGCTACATGGGAGCGCGGTGT | SEQ ID NO 265 |
| | 219537_X_AT | TGGCCACTCCCAGGATGCTGGGTCT | SEQ ID NO 266 |
| | | GATGCACTCAACAACCTAAGGACGC | SEQ ID NO 267 |
| | | GACGCAGGAGGGTTCCGGGGATGGT | SEQ ID NO 268 |
| | | GTCCGAGCTCGTCCGTAGATTGGAA | SEQ ID NO 269 |
| | | AATCGCCCTGAAGATGTAGACCCTC | SEQ ID NO 270 |
| | | GGATTTATGTCATATCTGCTCCTTC | SEQ ID NO 271 |
| | | CTTCCATCTACGCTCGGGAGGTAGC | SEQ ID NO 272 |
| | | CTTCCTCGATTCTGTCCGTGAAATG | SEQ ID NO 273 |
| | | TTTAAGCCCATTTTCAGTTCTAACT | SEQ ID NO 274 |
| | | TTACTTTCATCCTATTTTGCATCCC | SEQ ID NO 275 |
| JAG1 | HG-U133_PLUS_2: | TTTGTTTTTCTGCTTTAGACTTGAA | SEQ ID NO 276 |
| | 209099_X_AT | GAGACAGGCAGGTGATCTGCTGCAG | SEQ ID NO 277 |
| | | GGAAGCACACCAATCTGACTTTGTA | SEQ ID NO 278 |
| | | GATTTCTTTTCACCATTCGTACATA | SEQ ID NO 279 |
| | | GAACCACTTGTAGATTTGATTTTTT | SEQ ID NO 280 |
| | | AGATCACTGTTTAGATTTGCCATAG | SEQ ID NO 281 |
| | | TTTGCCATAGAGTACACTGCCTGCC | SEQ ID NO 282 |
| | | GTACACTGCCTGCCTTAAGTGAGGA | SEQ ID NO 283 |
| | | AGAGTAATCTTGTTGGTTCACCATT | SEQ ID NO 284 |
| | | GATACTTTGTATTGTCCTATTAGTG | SEQ ID NO 285 |
| | | GCATCTTTGATGTGTTGTTCTTGGC | SEQ ID NO 286 |
| KI67 | HG-U133_PLUS_2: | AAACTGGCTCCTAATCTCCAGCTTT | SEQ ID NO 287 |
| | 212020_S_AT | AGCTTCGGAAGTTTACTGGCTCTGC | SEQ ID NO 288 |
| | | TTCTTTCTGACTCTATCTGGCAGCC | SEQ ID NO 289 |
| | | GTACTCTGTAAAGCATCATCATCCT | SEQ ID NO 290 |
| | | GAGAGACTGAGCACTCAGCACCTTC | SEQ ID NO 291 |
| | | TTTCAGGATCGCTTCCTTGTGAGCC | SEQ ID NO 292 |
| | | TCTTTCTCCAGCTTCAGACTTGTAG | SEQ ID NO 293 |
| | | AACTCGTTCATCTTCATTTACTTTC | SEQ ID NO 294 |
| | | CAAATCAGAGAATAGCCCGCCATCC | SEQ ID NO 295 |
| | | CACCCACCTTGCCAGGTGCAGGTGA | SEQ ID NO 296 |
| | | GTTTCCCCAGTGTCTGGCGGGGAGC | SEQ ID NO 297 |
| EZH2 | HG-U133_PLUS_2: | AAATTCGTTTTGCAAATCATTCGGT | SEQ ID NO 298 |
| | 203358_S_AT | AAATCATTCGGTAAATCCAAACTGC | SEQ ID NO 299 |
| | | GATCACAGGATAGGTATTTTTGCCA | SEQ ID NO 300 |
| | | TTTTGCCAAGAGAGCCATCCAGACT | SEQ ID NO 301 |
| | | CCATCCAGACTGGCGAAGAGCTGTT | SEQ ID NO 302 |
| | | GAAACAGCTGCCTTAGCTTCAGGAA | SEQ ID NO 303 |
| | | CTGCCTTAGCTTCAGGAACCTCGAG | SEQ ID NO 304 |
| | | TCAGGAACCTCGAGTACTGTGGGCA | SEQ ID NO 305 |
| | | GCCTTCTCACCAGCTGCAAAGTGTT | SEQ ID NO 306 |
| | | CAAAGTGTTTTGTACCAGTGAATTT | SEQ ID NO 307 |
| | | GCAGTATGGTACATTTTTCAACTTT | SEQ ID NO 308 |
| BUB1 | HG-U133_PLUS_2: | GAAGATGATTTATCTGCTGGCTTGG | SEQ ID NO 309 |
| | 209642_AT | TGCTGGCTTGGCACTGATTGACCTG | SEQ ID NO 310 |
| | | GATGCTCAGCAACAAACCATGGAAC | SEQ ID NO 311 |
| | | GAACTACCAGATCGATTACTTTGGG | SEQ ID NO 312 |
| | | ATTACTTTGGGGTTGCTGCAACAGT | SEQ ID NO 313 |
| | | CATGCTCTTTGGCACTTACATGAAA | SEQ ID NO 314 |
| | | GAGAGTGTAAGCCTGAAGGTCTTTT | SEQ ID NO 315 |
| | | TTAGAAGGCTTCCTCATTTGGATAT | SEQ ID NO 316 |
| | | AATATTCCAGATTGTCATCATCTTC | SEQ ID NO 317 |
| | | GATTAGGGCCCTACGTAATAGGCTA | SEQ ID NO 318 |
| | | TAATAGGCTAATTGTACTGCTCTTA | SEQ ID NO 319 |
| AURKA | HG-U133_PLUS_2: | CCCTCAATCTAGAACGCTACACAAG | SEQ ID NO 320 |
| | 208079_S_AT | AAATAGGAACACGTGCTCTACCTCC | SEQ ID NO 321 |
| | | GTGCTCTACCTCCATTTAGGGATTT | SEQ ID NO 322 |
| | | CTACCTCCATTTAGGGATTTGCTTG | SEQ ID NO 323 |
| | | TTAGGGATTTGCTTGGGATACAGAA | SEQ ID NO 324 |
| | | GGGATACAGAAGAGGCCATGTGTCT | SEQ ID NO 325 |
| | | GAAGAGGCCATGTGTCTCAGAGCTG | SEQ ID NO 326 |
| | | GAGGCCATGTGTCTCAGAGCTGTTA | SEQ ID NO 327 |
| | | GTGTCTCAGAGCTGTTAAGGGCTTA | SEQ ID NO 328 |
| | | CAGAGCTGTTAAGGGCTTATTTTTT | SEQ ID NO 329 |
| | | CATTGGAGTCATAGCATGTGTGTAA | SEQ ID NO 330 |

[0378] Table 3 represents the probes sequences, their respective SEQ ID and the Affymetrix probe sets comprising them. The target gene is also indicated.

[0379] In one advantageous embodiment, the invention relates to a composition as defined above, wherein said set comprise at least 7 genes belonging to said group of 22 genes, said at least 7 genes comprising or being constituted by the respective nucleic acid sequences SEQ ID NO: 1 to 7.

[0380] In this configuration, the composition according to the invention consists of at least 7 pools: a pool of oligonucleotides specifically hybridizing with the gene SEQ ID NO: 1, a pool of oligonucleotides specifically hybridizing with the gene SEQ ID NO: 2, a pool of oligonucleotides specifically hybridizing with the gene SEQ ID NO: 3, a pool of oligonucleotides specifically hybridizing with the gene SEQ ID NO: 4, a pool of oligonucleotides specifically hybridizing with the gene SEQ ID NO: 5, a pool of oligonucleotides specifically hybridizing with the gene SEQ ID NO: 6, and a pool of oligonucleotides specifically hybridizing with the gene SEQ ID NO: 7.

[0381] In one advantageous embodiment, the invention relates to a composition as defined above, wherein said set comprise at least 9 genes belonging to a said group of 22 genes, said at least 9 genes comprising or being constituted by the respective nucleic acid sequences SEQ ID NO: 1 to 9.

[0382] In this configuration, the composition according to the invention consists of at least 9 pools: a pool of oligonucleotides specifically hybridizing with the gene SEQ ID NO: 1, a pool of oligonucleotides specifically hybridizing with the gene SEQ ID NO: 2, a pool of oligonucleotides specifically hybridizing with the gene SEQ ID NO: 3, a pool of oligonucleotides specifically hybridizing with the gene SEQ ID NO: 4, a pool of oligonucleotides specifically hybridizing with the gene SEQ ID NO: 5, a pool of oligonucleotides specifically hybridizing with the gene SEQ ID NO: 6, a pool of oligonucleotides specifically hybridizing with the gene SEQ ID NO: 7, a pool of oligonucleotides specifically hybridizing with the gene SEQ ID NO: 8 and a pool of oligonucleotides specifically hybridizing with the gene SEQ ID NO: 9.

[0383] The invention relates to a composition as defined above, wherein said set comprise at least 10 genes belonging to said group of 22 genes, said at least 10 genes comprising or being constituted by the respective nucleic acid sequences SEQ ID NO: 1 to 10.

[0384] In this configuration, the composition according to the invention consists of at least 10 pools: a pool of oligonucleotides specifically hybridizing with the gene SEQ ID NO: 1, a pool of oligonucleotides specifically hybridizing with the gene SEQ ID NO: 2, a pool of oligonucleotides specifically hybridizing with the gene SEQ ID NO: 3, a pool of oligonucleotides specifically hybridizing with the gene SEQ ID NO: 4, a pool of oligonucleotides specifically hybridizing with the gene SEQ ID NO: 5, a pool of oligonucleotides specifically hybridizing with the gene SEQ ID NO: 6, a pool of oligonucleotides specifically hybridizing with the gene SEQ ID NO: 7, a pool of oligonucleotides specifically hybridizing with the gene SEQ ID NO: 8, a pool of oligonucleotides specifically hybridizing with the gene SEQ ID NO: 9 and a pool of oligonucleotides specifically hybridizing with the gene SEQ ID NO: 10.

[0385] The invention relates to a composition as defined above, wherein said set comprise at least 16 genes belonging to said group of 22 genes, said at least 16 genes comprising or being constituted by the respective nucleic acid sequences SEQ ID NO: 1 to 16.

[0386] In this configuration, the composition according to the invention consists of at least 16 pools: a pool of oligonucleotides specifically hybridizing with the gene SEQ ID NO: 1, a pool of oligonucleotides specifically hybridizing with the gene SEQ ID NO: 2, a pool of oligonucleotides specifically hybridizing with the gene SEQ ID NO: 3, a pool of oligonucleotides specifically hybridizing with the gene SEQ ID NO: 4, a pool of oligonucleotides specifically hybridizing with the gene SEQ ID NO: 5, a pool of oligonucleotides specifically hybridizing with the gene SEQ ID NO: 6, a pool of oligonucleotides specifically hybridizing with the gene SEQ ID NO: 7, a pool of oligonucleotides specifically hybridizing with the gene SEQ ID NO: 8, a pool of oligonucleotides specifically hybridizing with the gene SEQ ID NO: 9, a pool of oligonucleotides specifically hybridizing with the gene SEQ ID NO: 10, a pool of oligonucleotides specifically hybridizing with the gene SEQ ID NO: 11, a pool of oligonucleotides specifically hybridizing with the gene SEQ ID NO: 12, a pool of oligonucleotides specifically hybridizing with the gene SEQ ID NO: 13, a pool of oligonucleotides specifically hybridizing with the gene SEQ ID NO: 14, a pool of oligonucleotides specifically hybridizing with the gene SEQ ID NO: 15 and a pool of oligonucleotides specifically hybridizing with the gene SEQ ID NO: 16.

[0387] In one advantageous embodiment, the invention relates to a composition as defined above, wherein said set consists of all the genes of said group of 22 genes.

[0388] In this configuration, the composition according to the invention consists of 22 pools: a pool of oligonucleotides specifically hybridizing with the gene SEQ ID NO: 1, a pool of oligonucleotides specifically hybridizing with the gene SEQ ID NO: 2, a pool of oligonucleotides specifically hybridizing with the gene SEQ ID NO: 3, a pool of oligonucleotides specifically hybridizing with the gene SEQ ID NO: 4, a pool of oligonucleotides specifically hybridizing with the gene SEQ ID NO: 5, a pool of oligonucleotides specifically hybridizing with the gene SEQ ID NO: 6, a pool of oligonucleotides specifically hybridizing with the gene SEQ ID NO: 7, a pool of oligonucleotides specifically hybridizing with the gene SEQ ID NO: 8, a pool of oligonucleotides specifically hybridizing with the gene SEQ ID NO: 9, a pool of oligonucleotides specifically hybridizing with the gene SEQ ID NO: 10, a pool of oligonucleotides specifically hybridizing with the gene SEQ ID NO: 11, a pool of oligonucleotides specifically hybridizing with the gene SEQ ID NO: 12, a pool of oligonucleotides specifically hybridizing with the gene SEQ ID NO: 13, a pool of oligonucleotides specifically hybridizing with the gene SEQ ID NO: 14, a pool of oligonucleotides specifically hybridizing with the gene SEQ ID NO: 15, a pool of oligonucleotides specifically hybridizing with the gene SEQ ID NO: 16, a pool of oligonucleotides specifically hybridizing with the gene SEQ ID NO: 17, a pool of oligonucleotides specifically hybridizing with the gene SEQ ID NO: 18, a pool of oligonucleotides specifically hybridizing with the gene SEQ ID NO: 19, a pool of oligonucleotides specifically hybridizing with the gene SEQ ID NO: 20, a pool of oligonucleotides specifically hybridizing with the gene SEQ ID NO: 21 and a pool of oligonucleotides specifically hybridizing with the gene SEQ ID NO: 22.

[0389] In one advantageous embodiment, the composition according to the invention as defined above may further comprise one or more pools containing oligonucleotides allowing the detection of control genes, such as Actin, TBP, tubuline and so on. The above list is not limitative.

[0390] The skill person could easily determine what type of control gene may be used.

[0391] In still another advantageous embodiment, the invention relates to a composition according to the previous definition, wherein said composition comprises at least a pair of oligonucleotides allowing the measure of the expression of the genes of said set of genes belonging to said group of 22 genes.

[0392] In this advantageous embodiment, each pool as defined above comprise a pair of oligonucleotides, said pair of oligonucleotides being such that they allow the PCR amplification of a determined gene.

[0393] This advantageous embodiment of the composition of the invention is particularly advantageous when PCR is used to quantify the expression level of the at least 3 genes according to the invention. However, this could be also used to carry out the method according to the invention by measure the expression level of the at least 3 genes by DNA-CHIP.

[0394] In a more advantageous embodiment, the invention relates to the composition defined above, wherein said composition comprises at least the oligonucleotides SEQ ID NO: 23-28, preferably at least the oligonucleotides SEQ ID NO: 23-40, more preferably at least the oligonucleotides SEQ ID NO: 23-42, more preferably at least the oligonucleotides SEQ ID NO: 23-54, chosen among the group consisting of the oligonucleotides SEQ ID NO: 23-66, and in particular said composition comprises the oligonucleotides SEQ ID NO: 23-66,

said oligonucleotides being such that:

[0395] SEQ ID NO: 23 and SEQ ID NO: 24 specifically hybridize with the gene SEQ ID NO: 1,

[0396] SEQ ID NO: 25 and SEQ ID NO: 26 specifically hybridize with the gene SEQ ID NO: 2,

[0397] SEQ ID NO: 27 and SEQ ID NO: 28 specifically hybridize with the gene SEQ ID NO: 3,

[0398] SEQ ID NO: 29 and SEQ ID NO: 30 specifically hybridize with the gene SEQ ID NO: 4,

[0399] SEQ ID NO: 31 and SEQ ID NO: 32 specifically hybridize with the gene SEQ ID NO: 5,

[0400] SEQ ID NO: 33 and SEQ ID NO: 34 specifically hybridize with the gene SEQ ID NO: 6,

[0401] SEQ ID NO: 35 and SEQ ID NO: 36 specifically hybridize with the gene SEQ ID NO: 7,

[0402] SEQ ID NO: 37 and SEQ ID NO: 38 specifically hybridize with the gene SEQ ID NO: 8,

[0403] SEQ ID NO: 39 and SEQ ID NO: 40 specifically hybridize with the gene SEQ ID NO: 9,

[0404] SEQ ID NO: 41 and SEQ ID NO: 42 specifically hybridize with the gene SEQ ID NO: 10,

[0405] SEQ ID NO: 43 and SEQ ID NO: 44 specifically hybridize with the gene SEQ ID NO: 11,

[0406] SEQ ID NO: 45 and SEQ ID NO: 46 specifically hybridize with the gene SEQ ID NO: 12,

[0407] SEQ ID NO: 47 and SEQ ID NO: 48 specifically hybridize with the gene SEQ ID NO: 13,

[0408] SEQ ID NO: 49 and SEQ ID NO: 50 specifically hybridize with the gene SEQ ID NO: 14,

[0409] SEQ ID NO: 51 and SEQ ID NO: 52 specifically hybridize with the gene SEQ ID NO: 15,

[0410] SEQ ID NO: 53 and SEQ ID NO: 54 specifically hybridize with the gene SEQ ID NO: 16,

[0411] SEQ ID NO: 55 and SEQ ID NO: 56 specifically hybridize with the gene SEQ ID NO: 17,

[0412] SEQ ID NO: 57 and SEQ ID NO: 58 specifically hybridize with the gene SEQ ID NO: 18,

[0413] SEQ ID NO: 59 and SEQ ID NO: 60 specifically hybridize with the gene SEQ ID NO: 19,

[0414] SEQ ID NO: 61 and SEQ ID NO: 62 specifically hybridize with the gene SEQ ID NO: 20,

[0415] SEQ ID NO: 63 and SEQ ID NO: 64 specifically hybridize with the gene SEQ ID NO: 21, and

[0416] SEQ ID NO: 65 and SEQ ID NO: 66 specifically hybridize with the gene SEQ ID NO: 22.

[0417] Moreover, the above composition may comprise Taqman probes.

[0418] The skilled person can easily determine the sequence of said Taqman probes.

[0419] The above nucleotides are disclosed in the following table:

| | | | PCR |
|---|---|---|---|
| | | | Product |
| GENE | oligonucleeotide | SEQUENCE | Size (bp) |
| CHI3L1 | Forward primer | GACCACAGGCCATCACAGTCC (SEQ ID NO: 23) | 89 |
| | Reverse primer | TGTACCCCACAGCATAGTCAGTGTT (SEQ ID NO: 24) | |
| IGFBP2 | Forward primer | GGCCCTCTGGAGCACCTCTACT (SEQ ID NO: 25) | 92 |
| | Reverse primer | CCGTTCAGAGACATCTTGCACTGT (SEQ ID NO: 26) | |
| POSTN | Forward primer | GTCCTAATTCCTGATTCTGCCAAA (SEQ ID NO: 27) | 79 |
| | Reverse primer | GGGCCACAAGATCCGTGAA (SEQ ID NO: 28) | |
| HSPG2 | Forward primer | GCCTGGATCTGAACGAGGAACTCTA (SEQ ID NO: 29) | 103 |
| | Reverse primer | AGCTCCCGGACACAGCCTATGA (SEQ ID NO: 30) | |
| BMP2 | Forward primer | CGCAGCTTCCACCATGAAGAATC (SEQ ID NO: 31) | 69 |
| | Reverse primer | GAATCTCCGGGTTGTTTTCCCACT (SEQ ID NO: 32) | |
| COL1A1 | Forward primer | CCTCCGGCTCCTGCTCCTCTT (SEQ ID NO: 33) | 227 |
| | Reverse primer | GGCAGTTCTTGGTCTCGTCACA (SEQ ID NO: 34) | |
| NEK2 | Forward primer | CCCTGTATTGAGTGAGCTGAAACTG (SEQ ID NO: 35) | 101 |
| | Reverse primer | GCTCCTGTTCTTTCTGCTCCAAT (SEQ ID NO: 36) | |
| DLG7 | Forward primer | CCAAATGGAGCAGACTAAGATTGAT (SEQ ID NO: 37) | 67 |
| | Reverse primer | TTGTCTTGGACCAGGTCGGAT (SEQ ID NO: 38) | |
| FOXM1 | Forward primer | GGGAGACCTGTGCAGATGGTGA (SEQ ID NO: 39) | 74 |
| | Reverse primer | TCGAAGCCACTGGATGTTGGAT (SEQ ID NO: 40) | |
| BIRC5 | Forward primer | CCCTTTCTCAAGGACCACCGCATC (SEQ ID NO: 41) | 92 |
| | Reverse primer | CCAGCCTCGGCCATCCGCT (SEQ ID NO: 42) | |
| PLK1 | Forward primer | GCAGATCAACTTCTTCCAGGATCA (SEQ ID NO: 43) | 81 |
| | Reverse primer | CGCTTCTCGTCGATGTAGGTCA (SEQ ID NO: 44) | |
| NKX6-1 | Forward primer | GAGAGGGCTCGTTTGGCCTATT (SEQ ID NO: 45) | 68 |
| | Reverse primer | CGGTTCTGGAACCAGACCTTGA (SEQ ID NO: 46) | |
| NRG3 | Forward primer | AGCCATGTCCAGCTGCAAAATTAT (SEQ ID NO: 47) | 87 |
| | Reverse primer | GCCGACAAAACTTGACTCCATCAT (SEQ ID NO: 48) | |
| BUB1B | Forward primer | ACTACAGTCCCAGCACCGACAAT (SEQ ID NO: 49) | 113 |
| | Reverse primer | TGCTTCGTTGTGGTACAGAAGACTC (SEQ ID NO: 50) | |
| VIM | Forward primer | CTCCCTCTGGTTGATACCCACTC (SEQ ID NO: 51) | 87 |
| | Reverse primer | AGAAGTTTCGTTGATAACCTGTCCA (SEQ ID NO: 52) | |
| TNC | Forward primer | GAGGGTGACCACCACACGCTT (SEQ ID NO: 53) | 73 |
| | Reverse primer | CAAGGCAGTGGTGTCTGTGACATC (SEQ ID NO: 54) | |
| DLL3 | Forward primer | CTCTGCTACCACCGGATGCC (SEQ ID NO: 55) | 99 |
| | Reverse primer | TCAAAGGACCTGGGTGTCTCACTA (SEQ ID NO: 56) | |
| JAG1 | Forward primer | GAAAACGTGCCAGTTAGATGCAA (SEQ ID NO: 57) | 82 |
| | Reverse primer | GCTGGCAATGAGATTCTTACAGGA (SEQ ID NO: 58) | |
| KI67 | Forward primer | ATTGAACCTGCGGAAGAGCTGA (SEQ ID NO: 59) | 105 |
| | Reverse primer | GGAGCGCAGGGATATTCCCTTA (SEQ ID NO: 60) | |
| EZH2 | Forward primer | AACTTCGAGCTCCTCTGAAGCAA (SEQ ID NO: 61) | 97 |
| | Reverse primer | AGCACCACTCCACTCCACATTCT (SEQ ID NO: 62) | |
| BUB1 | Forward primer | CCATTTGCCAGCTCAAGCTAGA (SEQ ID NO: 63) | 102 |
| | Reverse primer | CAGGCCATGTTATTTCCTGGATT (SEQ ID NO: 64) | |
| AURKA | Forward primer | GCATTTCAGGACCTGTTAAGGCTA (SEQ ID NO: 65) | 67 |
| | Reverse Primer | TGCTGAGTCACGAGAACACGTTT (SEQ ID NO: 66) | |

### Kits

[0420] The invention also provides kits for use in determining a clinical phenotype (such as prognosis) for a patient afflicted by a glioma, the kit comprising at least one probe specific for a gene or gene product as described above. The preferred combinations of genes or gene products are those described in relation to the methods described herein before.

[0421] The probe may be selected from the group consisting of a nucleic acid and an antibody. The kit may also further comprise one or more additional components selected from the group consisting of (i) one or more reference probe(s); (ii) one or more detection reagent(s); (iii) one or more agent(s) for immobilising a polypeptide on a solid support; (iv) a solid support material; (v) instructions for use of the kit or a component(s) thereof in a method described herein.

[0422] For example the kit may comprise one or more probes immobilised on a solid support, such as a biochip.

[0423] For example the kit may comprise one or more primers suitable for qPCR.

[0424] In one embodiment the invention relates to a kit comprising:
[0425] oligonucleotides allowing the measure of the expression of the genes of a set comprising at least 3 genes belonging to a group of 22 genes, said 22 genes comprising or being constituted by the respective nucleic acid sequences SEQ ID NO: 1 to 22,
[0426] wherein said at least 3 genes comprise or are constituted by the respective nucleic acid sequences SEQ ID NO: 1 to 3, and
[0427] a support comprising data regarding the expression value of said at least 3 genes belonging to a group of 22 genes obtained from control patients.

[0428] As explained below, “support” in this context may be, for example, computer-readable media, or other data capturing or presenting means.

[0429] The invention also relates to a kit comprising:
[0430] a composition as defined above, and
[0431] a support comprising data regarding the expression value of said at least 3 genes belonging to a group of 22 genes obtained from control patients.

[0432] The kit according to the invention is such that it comprises, at least,
[0433] oligonucleotides allowing the measure of the expression level of the genes SEQ ID NO: 1, SEQ ID NO: 2 and SEQ ID NO:3, . . . up to SEQ ID NO: 22, and
[0434] information regarding the control, or reference, patients that are required to carry out the method according to the invention, said information being on an appropriate support.

[0435] Therefore, a minimal format of the kit according to the invention may in one embodiment be:
[0436] a pair of oligonucleotides allowing the measure of the expression level of the gene SEQ ID NO: 1, in particular the oligonucleotides SEQ ID NO: 23 and 24,
[0437] a pair of oligonucleotides allowing the measure of the expression level of the gene SEQ ID NO: 2, in particular the oligonucleotides SEQ ID NO: 25 and 26,
[0438] a pair of oligonucleotides allowing the measure of the expression level of the gene SEQ ID NO: 3, in particular the oligonucleotides SEQ ID NO: 27 and 28, and
[0439] a support containing information regarding Qci, Ji, V₁i, V₂i, T1 and T2 values as defined above.

[0440] A most advantageous kit according to the invention comprises:
[0441] a pair of oligonucleotides allowing the measure of the expression level of the gene SEQ ID NO: 1, in particular the oligonucleotides SEQ ID NO: 23 and 24,
[0442] a pair of oligonucleotides allowing the measure of the expression level of the gene SEQ ID NO: 2, in particular the oligonucleotides SEQ ID NO: 25 and 26,
[0443] a pair of oligonucleotides allowing the measure of the expression level of the gene SEQ ID NO: 3, in particular the oligonucleotides SEQ ID NO: 27 and 28,
[0444] a pair of oligonucleotides allowing the measure of the expression level of the gene SEQ ID NO: 4, in particular the oligonucleotides SEQ ID NO: 29 and 30,
[0445] a pair of oligonucleotides allowing the measure of the expression level of the gene SEQ ID NO: 5, in particular the oligonucleotides SEQ ID NO: 31 and 32,
[0446] a pair of oligonucleotides allowing the measure of the expression level of the gene SEQ ID NO: 6, in particular the oligonucleotides SEQ ID NO: 33 and 34,
[0447] a pair of oligonucleotides allowing the measure of the expression level of the gene SEQ ID NO: 7, in particular the oligonucleotides SEQ ID NO: 35 and 36,
[0448] a pair of oligonucleotides allowing the measure of the expression level of the gene SEQ ID NO: 8, in particular the oligonucleotides SEQ ID NO: 37 and 38,
[0449] a pair of oligonucleotides allowing the measure of the expression level of the gene SEQ ID NO: 9, in particular the oligonucleotides SEQ ID NO: 39 and 40,
[0450] a pair of oligonucleotides allowing the measure of the expression level of the gene SEQ ID NO: 10, in particular the oligonucleotides SEQ ID NO: 41 and 42,
[0451] a pair of oligonucleotides allowing the measure of the expression level of the gene SEQ ID NO: 11, in particular the oligonucleotides SEQ ID NO: 43 and 44,
[0452] a pair of oligonucleotides allowing the measure of the expression level of the gene SEQ ID NO: 12, in particular the oligonucleotides SEQ ID NO: 45 and 46,
[0453] a pair of oligonucleotides allowing the measure of the expression level of the gene SEQ ID NO: 13, in particular the oligonucleotides SEQ ID NO: 47 and 48,
[0454] a pair of oligonucleotides allowing the measure of the expression level of the gene SEQ ID NO: 14, in particular the oligonucleotides SEQ ID NO: 49 and 50,
[0455] a pair of oligonucleotides allowing the measure of the expression level of the gene SEQ ID NO: 15, in particular the oligonucleotides SEQ ID NO: 51 and 52,
[0456] a pair of oligonucleotides allowing the measure of the expression level of the gene SEQ ID NO: 16, in particular the oligonucleotides SEQ ID NO: 53 and 54,
[0457] a pair of oligonucleotides allowing the measure of the expression level of the gene SEQ ID NO: 17, in particular the oligonucleotides SEQ ID NO: 55 and 56,
[0458] a pair of oligonucleotides allowing the measure of the expression level of the gene SEQ ID NO: 18, in particular the oligonucleotides SEQ ID NO: 57 and 58,
[0459] a pair of oligonucleotides allowing the measure of the expression level of the gene SEQ ID NO: 19, in particular the oligonucleotides SEQ ID NO: 59 and 60,
[0460] a pair of oligonucleotides allowing the measure of the expression level of the gene SEQ ID NO: 20, in particular the oligonucleotides SEQ ID NO: 61 and 62,
[0461] a pair of oligonucleotides allowing the measure of the expression level of the gene SEQ ID NO: 21, in particular the oligonucleotides SEQ ID NO: 63 and 64,
[0462] a pair of oligonucleotides allowing the measure of the expression level of the gene SEQ ID NO: 22, in particular the oligonucleotides SEQ ID NO: 65 and 66, and
[0463] a support containing information regarding Qci, Ji, V₁i, V₂i, T1 and T2 values as defined above.

[0464] Appropriate support comprised in the kit according to the invention can be:
[0465] a diskette, a CD-rom, an USB device, or any other device liable to contain pro-gram for computer that have to be implemented in the memory of a computer, containing information regarding Qci, Ji, V₁i, V₂i, T1 and T2 values,
[0466] a sheet (paper, carton . . . ) reproducing the information regarding Qci, Ji, V₁i, V₂i, T1 and T2 values, or referring, for instance, to an online software or website, said software or website containing, or compiling, information regarding Qci, Ji, V₁i, V₂i, T1 and T2 values.

[0467] The above examples of support are not limitative.

[0468] In one advantageous embodiment, the invention relates to the kit as defined above, wherein said support comprises the following data, for measurement with the PCR technique:
[0469] when the expression level of the genes SEQ ID NO: 1-3 is measured

| 3 genes | Qci | Ji | V1i | V2i | T1 | T2 |
|---|---|---|---|---|---|---|
| SEQ ID NO: 1 | 9.8895 | 3.5040 | −0.26557206 | 0.5975371 | 0.421766 | 1.4522384 |
| SEQ ID NO: 2 | 10.7617 | 2.8662 | −0.18905578 | 0.4253755 | | |
| SEQ ID NO: 3 | 4.8934 | 4.6331 | −0.04256449 | 0.0957701 | | |

[0470] when the expression level of the genes SEQ ID NO: 1-7 is measured

| 7 genes | Qci | Ji | V1i | V2i | T1 | T2 |
|---|---|---|---|---|---|---|
| SEQ ID NO: 1 | 9.8895 | 3.5040 | −0.309811118 | 0.697075015 | 0.4468138 | 1.5790433 |
| SEQ ID NO: 2 | 10.7617 | 2.8662 | −0.233294833 | 0.524913374 | | |
| SEQ ID NO: 3 | 4.8934 | 4.6331 | −0.086803548 | 0.195307982 | | |
| SEQ ID NO: 4 | 8.6122 | 2.5811 | −0.011870396 | 0.026708392 | | |
| SEQ ID NO: 5 | 10.0616 | 2.5943 | 0.008475628 | −0.019070162 | | |
| SEQ ID NO: 6 | 9.1961 | 3.4356 | −0.003268925 | 0.007355082 | | |
| SEQ ID NO: 7 | 7.0401 | 2.5542 | −0.003223563 | 0.007253016 | | |

[0471] when the expression level of the genes SEQ ID NO: 1-9 is measured

| 9 genes | Qci | Ji | V1i | V2i | T1 | T2 |
|---|---|---|---|---|---|---|
| SEQ ID NO: 1 | 9.8895 | 3.5040 | −0.331889301 | 0.746750927 | 0.4631175 | 1.6615805 |
| SEQ ID NO: 2 | 10.7617 | 2.8662 | −0.255373016 | 0.574589285 | | |
| SEQ ID NO: 3 | 4.8934 | 4.6331 | −0.10888173 | 0.244983893 | | |
| SEQ ID NO: 4 | 8.6122 | 2.5811 | −0.033948579 | 0.076384303 | | |
| SEQ ID NO: 5 | 10.0616 | 2.5943 | 0.03055381 | −0.068746073 | | |
| SEQ ID NO: 6 | 9.1961 | 3.4356 | −0.025347108 | 0.057030993 | | |
| SEQ ID NO: 7 | 7.0401 | 2.5542 | −0.025301745 | 0.056928927 | | |
| SEQ ID NO: 8 | 6.7866 | 3.1202 | −0.013802309 | 0.031055196 | | |
| SEQ ID NO: 9 | 7.4768 | 2.7594 | −0.002251371 | 0.005065584 | | |

[0472] when the expression level of the genes SEQ ID NO: 1-10 is measured

| 10 genes | Qci | Ji | V1i | V2i | T1 | T2 |
|---|---|---|---|---|---|---|
| SEQ ID NO: 1 | 9.8895 | 3.5040 | −0.37621105 | 0.84647485 | 0.509496 | 1.896372 |
| SEQ ID NO: 2 | 10.7617 | 2.8662 | −0.29969476 | 0.67431321 | | |
| SEQ ID NO: 3 | 4.8934 | 4.6331 | −0.15320348 | 0.34470782 | | |
| SEQ ID NO: 4 | 8.6122 | 2.5811 | −0.07827032 | 0.17610823 | | |
| SEQ ID NO: 5 | 10.0616 | 2.5943 | 0.07487556 | −0.16847 | | |
| SEQ ID NO: 6 | 9.1961 | 3.4356 | −0.06966885 | 0.15675492 | | |
| SEQ ID NO: 7 | 7.0401 | 2.5542 | −0.06962349 | 0.15665285 | | |
| SEQ ID NO: 8 | 6.7866 | 3.1202 | −0.05812405 | 0.13077912 | | |
| SEQ ID NO: 9 | 7.4768 | 2.7594 | −0.04657312 | 0.10478951 | | |
| SEQ ID NO: 10 | 8.4759 | 2.9469 | −0.04169181 | 0.09380658 | | |

[0473] when the expression level of the genes SEQ ID NO: 1-16 is measured

| 16 genes | Qci | Ji | V1i | V2i | T1 | T2 |
|---|---|---|---|---|---|---|
| SEQ ID NO: 1 | 9.8895 | 3.5040 | −0.398289229 | 0.896150764 | 0.540277 | 2.052201 |
| SEQ ID NO: 2 | 10.7617 | 2.8662 | −0.321772944 | 0.723989123 | | |
| SEQ ID NO: 3 | 4.8934 | 4.6331 | −0.175281658 | 0.394383731 | | |
| SEQ ID NO: 4 | 8.6122 | 2.5811 | −0.100348507 | 0.225784141 | | |
| SEQ ID NO: 5 | 10.0616 | 2.5943 | 0.096953738 | −0.218145911 | | |
| SEQ ID NO: 6 | 9.1961 | 3.4356 | −0.091747036 | 0.206430831 | | |
| SEQ ID NO: 7 | 7.0401 | 2.5542 | −0.091701673 | 0.206328765 | | |
| SEQ ID NO: 8 | 6.7866 | 3.1202 | −0.080202237 | 0.180455034 | | |
| SEQ ID NO: 9 | 7.4768 | 2.7594 | −0.068651299 | 0.154465422 | | |
| SEQ ID NO: 10 | 8.4759 | 2.9469 | −0.063769996 | 0.143482491 | | |
| SEQ ID NO: 11 | 8.4640 | 2.1597 | −0.020277623 | 0.045624651 | | |
| SEQ ID NO: 12 | 5.5556 | 2.3964 | −0.01079938 | 0.024298604 | | |
| SEQ ID NO: 13 | 9.2268 | 3.1865 | 0.008786792 | −0.019770281 | | |
| SEQ ID NO: 14 | 7.4760 | 2.6144 | −0.006607988 | 0.014867974 | | |
| SEQ ID NO: 15 | 16.4164 | 2.8714 | −0.006204653 | 0.013960469 | | |
| SEQ ID NO: 16 | 7.4201 | 3.3385 | −0.003597575 | 0.008094544 | | |

[0474] when the expression level of the genes SEQ ID NO: 1-22 is measured

| 22 genes | Qci | Ji | V1i | V2i | T1 | T2 |
|---|---|---|---|---|---|---|
| SEQ ID NO: 1 | 9.8895 | 3.5040 | −0.442610974 | 0.995874691 | 0.6255484 | 2.4838871 |
| SEQ ID NO: 2 | 10.7617 | 2.8662 | −0.366094689 | 0.82371305 | | |
| SEQ ID NO: 3 | 4.8934 | 4.6331 | −0.219603403 | 0.494107658 | | |
| SEQ ID NO: 4 | 8.6122 | 2.5811 | −0.144670252 | 0.325508068 | | |
| SEQ ID NO: 5 | 10.0616 | 2.5943 | 0.141275483 | −0.317869838 | | |
| SEQ ID NO: 6 | 9.1961 | 3.4356 | −0.136068781 | 0.306154758 | | |
| SEQ ID NO: 7 | 7.0401 | 2.5542 | −0.136023419 | 0.306052692 | | |
| SEQ ID NO: 8 | 6.7866 | 3.1202 | −0.124523982 | 0.28017896 | | |
| SEQ ID NO: 9 | 7.4768 | 2.7594 | −0.112973044 | 0.254189348 | | |
| SEQ ID NO: 10 | 8.4759 | 2.9469 | −0.108091741 | 0.243206417 | | |
| SEQ ID NO: 11 | 8.4640 | 2.1597 | −0.064599368 | 0.145348578 | | |
| SEQ ID NO: 12 | 5.5556 | 2.3964 | −0.055121125 | 0.124022531 | | |
| SEQ ID NO: 13 | 9.2268 | 3.1865 | 0.053108537 | −0.119494208 | | |
| SEQ ID NO: 14 | 7.4760 | 2.6144 | −0.050929734 | 0.114591901 | | |
| SEQ ID NO: 15 | 16.4164 | 2.8714 | −0.050526398 | 0.113684396 | | |
| SEQ ID NO: 16 | 7.4201 | 3.3385 | −0.04791932 | 0.107818471 | | |
| SEQ ID NO: 17 | 11.9663 | 3.4954 | 0.030451917 | −0.068516814 | | |
| SEQ ID NO: 18 | 11.3260 | 2.2250 | −0.029802867 | 0.067056452 | | |
| SEQ ID NO: 19 | 9.2557 | 3.1583 | −0.014836187 | 0.033381421 | | |
| SEQ ID NO: 20 | 8.4543 | 2.5087 | −0.010433641 | 0.023475692 | | |
| SEQ ID NO: 21 | 6.9780 | 4.4847 | −0.002903001 | 0.006531752 | | |
| SEQ ID NO: 22 | 7.2556 | 2.6921 | −0.002374696 | 0.005343066 | | |

[0475] In one advantageous embodiment, the invention relates to the kit as defined above, wherein said support comprises the following data, for measurement with the DNA CHIP technique:
[0476] when the expression level of the genes SEQ ID NO: 1-3 is measured

| 3 genes | Qci | Ji | V1i | V2i | T1 | T2 |
|---|---|---|---|---|---|---|
| SEQ ID NO: 1 | 8.1111 | 3.5040 | −0.26557206 | 0.5975371 | 0.421766 | 1.4522384 |
| SEQ ID NO: 2 | 8.6287 | 2.8662 | −0.18905578 | 0.4253755 | | |
| SEQ ID NO: 3 | 6.0748 | 4.6331 | −0.04256449 | 0.0957701 | | |

[0477] when the expression level of the genes SEQ ID NO: 1-7 is measured

| 7 genes | Qci | Ji | V1i | V2i | T1 | T2 |
|---|---|---|---|---|---|---|
| SEQ ID NO: 1 | 8.1111 | 3.5040 | −0.309811118 | 0.697075015 | 0.4468138 | 1.5790433 |
| SEQ ID NO: 2 | 8.6287 | 2.8662 | −0.233294833 | 0.524913374 | | |
| SEQ ID NO: 3 | 6.0748 | 4.6331 | −0.086803548 | 0.195307982 | | |
| SEQ ID NO: 4 | 7.2020 | 2.5811 | −0.011870396 | 0.026708392 | | |
| SEQ ID NO: 5 | 9.2810 | 2.5943 | 0.008475628 | −0.019070162 | | |
| SEQ ID NO: 6 | 9.1734 | 3.4356 | −0.003268925 | 0.007355082 | | |
| SEQ ID NO: 7 | 5.0310 | 2.5542 | −0.003223563 | 0.007253016 | | |

| 9 genes | Qci | Ji | V1i | V2i | T1 | T2 |
|---|---|---|---|---|---|---|
| SEQ ID NO: 1 | 8.1111 | 3.5040 | −0.331889301 | 0.746750927 | 0.4631175 | 1.6615805 |
| SEQ ID NO: 2 | 8.6287 | 2.8662 | −0.255373016 | 0.574589285 | | |
| SEQ ID NO: 3 | 6.0748 | 4.6331 | −0.10888173 | 0.244983893 | | |
| SEQ ID NO: 4 | 7.2020 | 2.5811 | −0.033948579 | 0.076384303 | | |
| SEQ ID NO: 5 | 9.2810 | 2.5943 | 0.03055381 | −0.068746073 | | |
| SEQ ID NO: 6 | 9.1734 | 3.4356 | −0.025347108 | 0.057030993 | | |
| SEQ ID NO: 7 | 5.0310 | 2.5542 | −0.025301745 | 0.056928927 | | |
| SEQ ID NO: 8 | 5.1660 | 3.1202 | −0.013802309 | 0.031055196 | | |
| SEQ ID NO: 9 | 5.1174 | 2.7594 | −0.002251371 | 0.005065584 | | |

[0478] when the expression level of the genes SEQ ID NO: 1-9 is measured

| 10 genes | Qci | Ji | V1i | V2i | T1 | T2 |
|---|---|---|---|---|---|---|
| SEQ ID NO: 1 | 8.1111 | 3.5040 | −0.37621105 | 0.84647485 | 0.509496 | 1.896372 |
| SEQ ID NO: 2 | 8.6287 | 2.8662 | −0.29969476 | 0.67431321 | | |
| SEQ ID NO: 3 | 6.0748 | 4.6331 | −0.15320348 | 0.34470782 | | |
| SEQ ID NO: 4 | 7.2020 | 2.5811 | −0.07827032 | 0.17610823 | | |
| SEQ ID NO: 5 | 9.2810 | 2.5943 | 0.07487556 | −0.16847 | | |
| SEQ ID NO: 6 | 9.1734 | 3.4356 | −0.06966885 | 0.15675492 | | |
| SEQ ID NO: 7 | 5.0310 | 2.5542 | −0.06962349 | 0.15665285 | | |
| SEQ ID NO: 8 | 5.1660 | 3.1202 | −0.05812405 | 0.13077912 | | |
| SEQ ID NO: 9 | 5.1174 | 2.7594 | −0.04657312 | 0.10478951 | | |
| SEQ ID NO: 10 | 6.3898 | 2.9469 | −0.04169181 | 0.09380658 | | |

[0479] when the expression level of the genes SEQ ID NO: 1-10 is measured

| 10 genes | Qci | Ji | V1i | V2i | T1 | T2 |
|---|---|---|---|---|---|---|
| SEQ ID NO: 1 | 8.1111 | 3.5040 | −0.37621105 | 0.84647485 | 0.509496 | 1.896372 |
| SEQ ID NO: 2 | 8.6287 | 2.8662 | −0.29969476 | 0.67431321 | | |
| SEQ ID NO: 3 | 6.0748 | 4.6331 | −0.15320348 | 0.34470782 | | |
| SEQ ID NO: 4 | 7.2020 | 2.5811 | −0.07827032 | 0.17610823 | | |
| SEQ ID NO: 5 | 9.2810 | 2.5943 | 0.07487556 | −0.16847 | | |
| SEQ ID NO: 6 | 9.1734 | 3.4356 | −0.06966885 | 0.15675492 | | |
| SEQ ID NO: 7 | 5.0310 | 2.5542 | −0.06962349 | 0.15665285 | | |
| SEQ ID NO: 8 | 5.1660 | 3.1202 | −0.05812405 | 0.13077912 | | |
| SEQ ID NO: 9 | 5.1174 | 2.7594 | −0.04657312 | 0.10478951 | | |
| SEQ ID NO: 10 | 6.3898 | 2.9469 | −0.04169181 | 0.09380658 | | |

[0480] when the expression level of the genes SEQ ID NO: 1-16 is measured

| 16 genes | Qci | Ji | V1i | V2i | T1 | T2 |
|---|---|---|---|---|---|---|
| SEQ ID NO: 1 | 8.1111 | 3.5040 | −0.398289229 | 0.896150764 | 0.540277 | 2.052201 |
| SEQ ID NO: 2 | 8.6287 | 2.8662 | −0.321772944 | 0.723989123 | | |
| SEQ ID NO: 3 | 6.0748 | 4.6331 | −0.175281658 | 0.394383731 | | |
| SEQ ID NO: 4 | 7.2020 | 2.5811 | −0.100348507 | 0.225784141 | | |
| SEQ ID NO: 5 | 9.2810 | 2.5943 | 0.096953738 | −0.218145911 | | |
| SEQ ID NO: 6 | 9.1734 | 3.4356 | −0.091747036 | 0.206430831 | | |
| SEQ ID NO: 7 | 5.0310 | 2.5542 | −0.091701673 | 0.206328765 | | |
| SEQ ID NO: 8 | 5.1660 | 3.1202 | −0.080202237 | 0.180455034 | | |
| SEQ ID NO: 9 | 5.1174 | 2.7594 | −0.068651299 | 0.154465422 | | |
| SEQ ID NO: 10 | 6.3898 | 2.9469 | −0.063769996 | 0.143482491 | | |
| SEQ ID NO: 11 | 8.8992 | 2.1597 | −0.020277623 | 0.045624651 | | |
| SEQ ID NO: 12 | 2.2380 | 2.3964 | −0.01079938 | 0.024298604 | | |
| SEQ ID NO: 13 | 6.9486 | 3.1865 | 0.008786792 | −0.019770281 | | |
| SEQ ID NO: 14 | 6.6286 | 2.6144 | −0.006607988 | 0.014867974 | | |
| SEQ ID NO: 15 | 13.6886 | 2.8714 | −0.006204653 | 0.013960469 | | |
| SEQ ID NO: 16 | 9.2036 | 3.3385 | −0.003597575 | 0.008094544 | | |

[0481] when the expression level of the genes SEQ ID NO: 1-22 is measured

| 22 genes | Qci | Ji | V1i | V2i | T1 | T2 |
|---|---|---|---|---|---|---|
| SEQ ID NO: 1 | 8.1111 | 3.5040 | −0.442610974 | 0.995874691 | 0.6255484 | 2.4838871 |
| SEQ ID NO: 2 | 8.6287 | 2.8662 | −0.366094689 | 0.82371305 | | |
| SEQ ID NO: 3 | 6.0748 | 4.6331 | −0.219603403 | 0.494107658 | | |
| SEQ ID NO: 4 | 7.2020 | 2.5811 | −0.144670252 | 0.325508068 | | |
| SEQ ID NO: 5 | 9.2810 | 2.5943 | 0.141275483 | −0.317869838 | | |
| SEQ ID NO: 6 | 9.1734 | 3.4356 | −0.136068781 | 0.306154758 | | |
| SEQ ID NO: 7 | 5.0310 | 2.5542 | −0.136023419 | 0.306052692 | | |
| SEQ ID NO: 8 | 5.1660 | 3.1202 | −0.124523982 | 0.28017896 | | |
| SEQ ID NO: 9 | 5.1174 | 2.7594 | −0.112973044 | 0.254189348 | | |
| SEQ ID NO: 10 | 6.3898 | 2.9469 | −0.108091741 | 0.243206417 | | |
| SEQ ID NO: 11 | 8.8992 | 2.1597 | −0.064599368 | 0.145348578 | | |
| SEQ ID NO: 12 | 2.2380 | 2.3964 | −0.055121125 | 0.124022531 | | |
| SEQ ID NO: 13 | 6.9486 | 3.1865 | 0.053108537 | −0.119494208 | | |
| SEQ ID NO: 14 | 6.6286 | 2.6144 | −0.050929734 | 0.114591901 | | |
| SEQ ID NO: 15 | 13.6886 | 2.8714 | −0.050526398 | 0.113684396 | | |
| SEQ ID NO: 16 | 9.2036 | 3.3385 | −0.04791932 | 0.107818471 | | |
| SEQ ID NO: 17 | 8.5740 | 3.4954 | 0.030451917 | −0.068516814 | | |
| SEQ ID NO: 18 | 10.7286 | 2.2250 | −0.029802867 | 0.067056452 | | |
| SEQ ID NO: 19 | 4.8529 | 3.1583 | −0.014836187 | 0.033381421 | | |
| SEQ ID NO: 20 | 8.0629 | 2.5087 | −0.010433641 | 0.023475692 | | |
| SEQ ID NO: 21 | 4.8347 | 4.4847 | −0.002903001 | 0.006531752 | | |
| SEQ ID NO: 22 | 6.3091 | 2.6921 | −0.002374696 | 0.005343066 | | |

### Treatment Methods

[0482] In one aspect the invention provides a method of treating glioma, which method comprises:

[0483] (i) determining a clinical phenotype (such as prognosis) for a patient afflicted by a glioma as described above,

[0484] (ii) formulating a therapeutic regime suitable for the treatment of the patient based on the determination at (i); and

[0485] (iii) administering said therapeutic regime to said patient.

[0486] The terms “treatment” or “therapy” where used herein refer to any administration of a therapeutic (which may or may not be specific for a protein encoded by a gene of the invention described herein) to alleviate the severity of the glioma in the patient, and includes treatment intended to cure the disease, provide relief from the symptoms of the disease and to prevent or arrest the development of the disease in an individual at risk from developing the disease or an individual having symptoms indicating the development of the disease in that individual.

[0487] Any sub-titles herein are included for convenience only, and are not to be construed as limiting the disclosure in any way.

[0488] The invention will now be further described with reference to the following non-limiting Figures and Examples. Other embodiments of the invention will occur to those skilled in the art in the light of these.

[0489] The disclosure of all references cited herein, inasmuch as it may be used by those skilled in the art to carry out the invention, is hereby specifically incorporated herein by cross-reference.

[0490] The invention is illustrated by the following example and the following FIGS. 1-5.

### LEGEND TO THE FIGURES

[0491] FIG. 1 represents the hierarchical clustering of the training cohort. The initial survival-relevant list of 27 genes was used. Each end line represents a patient. Two branches are separating most of the deceased patients (branch labeled “high risk”, squares) from the mainly alive, low risk patients.

[0492] Y-axis represents the dendrogram height; ▪ represents dead patient; ▴ represents alive patient.

[0493] FIG. 2 represents the comparison of the overall survival groups generated by hierarchical clustering (black lines; p<2.8e-10) and the OMS classification (grey lines; P<0.018) in the training cohort. Kaplan-Meier curves are plotted for each classification groups and the significance of survival differences is calculated using a log-rank test. Y-axis represents the cumulative survival; X-axis represents the time expressed in months

[0494] FIG. 3: Dissimilarities between molecular groups of the training cohort. Assessed by the distance matrix between samples of the training cohort using the expression of the initial 27 genes list. Two regions (similar when darker) clearly group the “Low risk” (LR-1. in the figure) survivors and the “High risk” (HR-2. in the figure), mostly deceased patients.

[0495] FIG. 4: Optimization of the predictor length and misclassification errors. The length and the number of errors were plotted as a function of the threshold of the training phase of the PAM algorithm. A number of 22 genes corresponds to the lowest number (0 here) of errors (left-most rectangle ▪) and down to 3 genes keeps the misclassification error under 5% (small rectangle at right ). ∘ represents training error.

[0496] X-axis represents threshold.

[0497] FIGS. 5A-F represent the comparison of the overall survival groups generated by prediction and the OMS classification in the validation cohort. Kaplan-Meier curves are plotted for each classification groups and the significance of survival differences is calculated using a log-rank test. X-axis represent time in months; Y-axis represent cumulated survival

[0498] FIG. 5A represents the Kaplan-Meier curves of the 22 genes of the predictor (black lines; p<2e-14) compared to the WHO prediction (grey lines).

[0499] FIG. 5B represents the Kaplan-Meier curves of the 16 genes of the predictor (black lines; p<5.9e-13) compared to the WHO prediction (grey lines).

[0500] FIG. 5C represents the Kaplan-Meier curves of the 10 genes of the predictor (black lines; p<2.3e-12) compared to the WHO prediction (grey lines).

[0501] FIG. 5D represents the Kaplan-Meier curves of the 9 genes of the predictor (black lines; p<1.4e-8) compared to the WHO prediction (grey lines).

[0502] FIG. 5E represents the Kaplan-Meier curves of the 7 genes of the predictor (black lines; p<5.4e-6) compared to the WHO prediction (grey lines).

[0503] FIG. 5F represents the Kaplan-Meier curves of the 3 genes of the predictor (black lines; p<1.6e-5) compared to the WHO prediction (grey lines).

### EXAMPLES

[0504] All the mathematical and statistical analysis have been realised with the free softwares R version 2.11.1 (http://www.R-project.org) and Bioconductor, version 2.2 [Gentleman R C, et al. Genome Biol. 2004; 5(10):R80].

### Building the Classification on the Training Cohort

### 1/ Gene Choice

[0505] A preliminary study made with a limited number of patients has allows the Inventors to identify 38 genes among 380 significantly involved during the low grade glioma progression.

[0506] The expression of these genes has been quantified by PCR with oligonucleotides with a control (reference) first cohort of 65 patients well documented (global survival, WHO classification, anatomopathologic information . . . ). This cohort represents the training cohort.

[0507] For all the genes, the expression signals obtained by PCR were normalized with the signal of expression of the TBP protein, according to the following formula:

$$Qri = {log}_{2} ( \frac{Si}{Sc} \times 1000 ) ,$$

wherein Si represents the signal obtained for a gene i, and Sc represent the signal obtained for TBP.

[0508] For each of the genes, the application of the Cox proportional hazards model (Cox regression) has allowed the Inventors to obtain a gene list ordered by decreasing significant probability.

[0509] Applying to that list a Benjamini and Hochberg [Benjamini et al. Journal of the Royal Statistical Society Series B. 1995; 57(1):289-300] multiple testing correction at 5% eliminate 11 genes among the 38 genes used initially. The remaining 27 genes are represented in the following table 4:

| | | | |
|---|---|---|---|
| | | Chromosome | |
| Gene | Probe set | banding | Description^{$} |

Poor prognosis

| | | | |
|---|---|---|---|
| AURKA | 208079_s_at | 20q13.2-q13.3 | serine/threonine kinase 6 |
| BIRC5 | 202095_s_at | 17q25 | baculoviral IAP repeat-containing 5 |
| | | | (survivin) |
| BUB1 | 209642_at | 2q14 | BUB1 budding uninhibited by |
| | | | benzimidazoles 1 homolog (yeast) |
| BUB1B | 203755_at | 15q15 | BUB1 budding uninhibited by |
| | | | benzimidazoles 1 homolog beta (yeast) |
| CHI3L1 | 209396_s_at | 1q32.1 | chitinase 3-like 1 (cartilage glycoprotein-39) |
| COL1A1 | 1556499_s_at | 17q21.3-q22.1 | collagen; type I; alpha 1 |
| DLG7 | 203764_at | 14q22.3 | discs; large homolog 7 (Drosophila) |
| EZH2 | 203358_s_at | 7q35-q36 | enhancer of zeste homolog 2 (Drosophila) |
| FOXM1 | 214148_at | 12p13 | Forkhead box M1 |
| HSPG2 | 201655_s_at | 1p36.1-p34 | heparan sulfate proteoglycan 2 (perlecan) |
| IGFBP2 | 202718_at | 2q33-q34 | insulin-like growth factor binding protein 2; |
| | | | 36 kDa |
| JAG1 | 209099_x_at | 20p12.1-p11.23 | jagged 1 (Alagille syndrome) |
| KI67 | 212020_s_at | 10q25-qter | antigen identified by monoclonal antibody |
| | | | Ki-67 |
| NEK2 | 204641_at | 1q32.2-q41 | NIMA (never in mitosis gene a)-related |
| | | | kinase 2 |
| NKX6-1 | 221366_at | 4q21.2-q22 | NK6 transcription factor related; locus 1 |
| | | | (Drosophila) |
| PLK1 | 1555900_at | 16p12.1 | Polo-like kinase 1 (Drosophila) |
| POSTN | 210809_s_at | 13q13.3 | periostin; osteoblast specific factor |
| PROM1 | 204304_s_at | 4p15.32 | prominin 1 |
| SMO | 218629_at | 7q32.3 | smoothened homolog (Drosophila) |
| TIMELESS | 203046_s_at | 12q12-q13 | timeless homolog (Drosophila) |
| TNC | 201645_at | 9q33 | tenascin C (hexabrachion) |
| VIM | 201426_s_at | 10p13 | vimentin |

Good prognosis

| | | | |
|---|---|---|---|
| APOD | 201525_at | 3q26.2-qter | apolipoprotein D |
| BMP2 | 205289_at | 20p12 | bone morphogenetic protein 2 |
| DLL3 | 219537_x_at | 19q13 | delta-like 3 (Drosophila) |
| NRG3 | 229233 at | 10q22-q23 | neuregulin 3 |
| TACSTD1 | 201839_s_at | 2p21 | tumor-associated calcium signal transducer |
| | | | 1 |

^{$}Affymetrix annotations

[0510] Table 4 represents the twenty-seven genes and corresponding probe sets significant in univariate Cox model of overall survival in training cohort with multiple testing corrections.

[0511] In general terms, and as described herein, overexpression of APOD, BMP2, DLL3, NRG3 and TACSTD1 may be associated with good prognosis, while overexpression of the remaining genes in Table 1 may be associated with poor prognosis.

### 2/ Training Classes Selection

[0512] An unsupervised hierarchical clustering (HC) was performed on the PCR expression signal of the 27 OS-relevant genes after normalization on the mean value of each gene over the cohort. Normalization values are recorded for further use with any new patient in the same PCR conditions. As shown on FIG. 1, samples split into two main clusters of 20 and 45 patients. Survival analysis between those groups revealed that 75% (15/20) of patients are deceased in the “High-risk” group compared to only less than 9% (4/45) in the “Low-risk” group. The duration of survival in the latter group is much longer as demonstrated by the Kaplan-Meier curves comparing training classes (black, FIG. 2). The survival curves (grey) for the grade II and III WHO classification in the same cohort were superimposed on the same figure. Strikingly different log-rank tests between classifications are reported in the upper part of Table 5. Dissimilarities between groups are assessed by the distance matrix using the R-package “HOPACH” [van der Loan M and Pollard K. Journal of Statistical Planning and Inference. 2003; 117:275-303]. FIG. 3 again depicts two groups (similarities in blue) clearly separating the “Low risk” (LR)/survivors from the “High risk” (HR)/deceased patients.

[0513] Table 5 represents the differential survival analysis of intermediate grade glioma on training and validation cohorts

| | Prognosis | Patient | Event | % | % | Log-rank | % Survival | Median |
|---|---|---|---|---|---|---|---|---|
| Cohort | group | number | number | patient | event | P-value* | at 24 mo | survival (mo) |
| Training | OMS grade 2 | 28 | 3 | 43 | 11 | 0.018 | 95 | NR^{$} |
| | OMS grade 3 | 37 | 16 | 57 | 43 | | 57 | NR |
| | HC^{†} class LR | 45 | 4 | 69 | 9 | 2.8E−10 | 94 | NR |
| | HC class HR | 20 | 15 | 31 | 75 | | 21 | 17.3 |
| Validation | OMS grade 2 | 24 | 16 | 23 | 67 | NS^{#} | 65 | 45.2 |
| | OMS grade 3 | 80 | 72 | 77 | 90 | (0.48) | 60 | 37.9 |
| | PAM^{‡} class LR | 69 | 55 | 66 | 80 | 2.0E−14 | 82 | 72.5 |
| | PAM class HR | 35 | 33 | 34 | 94 | | 18 | 13.2 |

*On one degree of freedom
^{$}Not reached
^{†}Hierarchical Clustering Low (LR) or High (HR) Risk
^{#}Not significant at a 5% risk
^{‡}Prediction Analysis for Microarray Low (LR) or High (HR) Risk

### Building the Classifier on the Training Cohort

### 1/ Predictor Training

[0514] The “pamr” R-package (PAM, prediction analysis for microarray) [Tibshirani R, et al. Proceedings of the National Academy of Sciences of the United States of America. 2002; 99(10):6567-6572] was applied to normalized expression values of the 27 genes between the two prognosis groups selected above in the training cohort. This prediction method is based on “shrunken centroids”, with the “threshold optimization” option (adapted shrinkage thresholds). A 10-times cross validation allows selecting a threshold with a minimal misclassification error rate in training confusion matrices. FIG. 4 displays the number of genes and the respective error rates as a function of the selected threshold. Here, the minimal error rate occurs with a minimal number of 22 out of the initial 27 used for training. The gene list sorted by decreasing scores is depicted in Table 6.

[0515] Table 6 represents the twenty-two genes predicting for risk classification in a prediction analysis for microarrays on the training cohort clusters (sorted by score)

Class score

| | Class LR | Class HR |
|---|---|---|
| Gene | Low risk | High risk |
| CHI3L1 | −0.4426 | 0.9959 |
| IGFBP2 | −0.3661 | 0.8237 |
| POSTN | −0.2196 | 0.4941 |
| HSPG2 | −0.1447 | 0.3255 |
| BMP2 | 0.1413 | −0.3179 |
| COL1A1 | −0.1361 | 0.3062 |
| NEK2 | −0.136 | 0.3061 |
| DLG7 | −0.1245 | 0.2802 |
| FOXM1 | −0.113 | 0.2542 |
| BIRC5 | −0.1081 | 0.2432 |
| PLK1 | −0.0646 | 0.1453 |
| NKX6-1 | −0.0551 | 0.124 |
| NRG3 | 0.0531 | −0.1195 |
| BUB1B | −0.0509 | 0.1146 |
| VIM | −0.0505 | 0.1137 |
| TNC | −0.0479 | 0.1078 |
| DLL3 | 0.0305 | −0.0685 |
| JAG1 | −0.0298 | 0.0671 |
| KI67 | −0.0148 | 0.0334 |
| EZH2 | −0.0104 | 0.0235 |
| BUB1 | −0.0029 | 0.0065 |
| AURKA | −0.0024 | 0.0053 |

[0516] This constitutes the list to use for prediction of clinical classification of any new patient. But this figure also shows that one can use only the first 3 genes with a slight increase of errors for a similar result (crossing of easy/efficient curves). On the contrary, using the two first genes rapidly increases the error rate and should be avoided. Tables 7 depict confusion matrices in both error-stringent and ease-of-use situations.

[0517] Tables 7 represent the confusion matrices (training cohort)

[0518] Table 7A represents the 22 genes predictor

| | Prediction | Prediction | Class error |
|---|---|---|---|
| | LR class | HR class | rate |
| Training | | | |
| Low risk (LR) class | 45 | 0 | 0 |
| High risk (HR) class | 0 | 20 | 0 |
| Cross | | | |
| validation | | | |
| Low risk (LR) class | 45 | 0 | 0 |
| High risk (HR) class | 0 | 20 | 0 |

Global error rate = 0

[0519] Table 7B represents the 3 genes predictor

| | Prediction | Prediction | Class error |
|---|---|---|---|
| | LR class | HR class | rate |
| Training | | | |
| Low risk (LR) class | 44 | 1 | 0.022 |
| High risk (HR) class | 1 | 19 | 0.05 |
| Cross | | | |
| validation | | | |
| Low risk (LR) class | 44 | 1 | 0.022 |
| High risk (HR) class | 1 | 19 | 0.05 |

Global error rate = 0.031

### 2/ Predictor Validation

[0520] Validation was performed on an independent cohort (Netherlands) of 104 patients with a follow-up of more than 20 years, fully documented for clinical data of overall survival and WHO classification II and Ill grades. For each of these patients, mRNA was purified at diagnosis and hybridized on a Affymetrix U133Plus2.0 chip (^{˜}55,000 pan-genomic probes). Raw files of expression values from chip scans are retrieved along with clinical data (GEO, accession number GSE16011) as published. CEL files are normalized according to the GCRMA [Wu Z, et al. Journal of the American Statistical Association. 2004; 99(8):909-917] method, providing the log₂ of expression value for each probe. We then extracted the 22 probes corresponding to the 22 genes selected during the training phase (listed in Table 4 above). Those values are normalized on the mean value of each probe over the 104 samples. Normalization values are recorded for further use with any new patient in identical conditions, namely same type of chip normalized with the GCRMA parameters from the test cohort using a recent modification (http://code.google.com/p/gep-r/downloads/list) of the incremental preprocessing of the R-package “docval”[Kostka D and Spang R. PloS Comput biol. 2008; 4:e22]. Validation is performed using the “pamr.predict” method of the PAM package PAM, predicting the risk classes Low-LR ou High-HR respectively to differentiate from former WHO “grade II” et “grade III” for the 104 patients of the test cohort. The proportion of high risk patients is 34%, very similar to the one of the training cohort (31%). The strength of the predictor is evaluated by a log-rank test between the two classes survival. Table 5 above (lower part) displays a very significant difference (P≦2×10⁻¹⁴), while WHO classification for this cohort is not even significantly correlated to survival. The Kaplan-Meier curves (FIGS. 5 A-F) illustrate the high-risk classification as a function of the number of predictor genes selected. Finally, the power of the 22 genes predictor compared to conventional WHO classification is illustrated in Table 8, comparing both methods in uni and multivariate Cox analysis.

[0521] Furthermore, the dependency of the predictor classification to commonly used grade 2/3 glioma prognostic factors (1p19q loss of heterozygosity, IDH1 gene mutation and EGFR gene amplification) was analyzed using the validation cohort for which these molecular data were available.

[0522] As expected the absence of 1p19q codeletion or the amplification of EGFR presented a significant higher risk of poor survival in univariate analysis. However the absence of IDH1 mutation was not associated with a poor outcome in this cohort. In multivariate analysis of each factor and the PAM prediction, only EGFR amplification remained an independent prognostic factor (Table 8). Finally, when testing all prognostic factors together, only PAM classification remained significant.

TABLE 8
Uni- and multivariate Cox model analysis applied to prognosis
groups 30 for overall survival of grade II and III gliomas

| | |
|---|---|
| Training cohort | Validation cohort |

| | | | | |
|---|---|---|---|---|
| Score | HR^{$} | P-value | HR | P-value |

Univariate Cox model

| | | | | |
|---|---|---|---|---|
| WHO | 4.1 | 0.028 | 1.2 | NS^{#} |
| HC/PAM* | 26.2 | 1.7E−05 | 5.8 | 2.2E−12 |
| 1p19q no codeletion | — | — | 1.9 | 0.015 |
| IDH1 no mutation | — | — | 1.1 | NS |
| EGFR amplification | — | — | 4.0 | 3.5E−04 |

Multivariate Cox model

| | | | | |
|---|---|---|---|---|
| HC/PAM | 23.3 | 4.5E−05 | 6.0 | 4.7E−12 |
| WHO | 2.3 | NS | 0.8 | NS |
| PAM | — | — | 9.7 | 5.5E−09 |
| 1p19q no codeletion | — | — | 1.4 | NS |
| PAM | — | — | 6.1 | 1.9E−09 |
| IDH1 no mutation | — | — | 0.7 | NS |
| PAM | — | — | 4.7 | 2.4E−06 |
| EGFR amplification | — | — | 2.7 | 0.015 |
| PAM | — | — | 12.1 | 1.2E−05 |
| WHO | — | — | 0.8 | NS |
| Ip19q no codeletion | — | — | 1.6 | NS |
| IDH1 no mutation | — | — | 1.0 | NS |
| EGFR amplification | — | — | 1.2 | NS |

*HC: training; PAM: predicted validation
^{$}Hazard ratio
^{#}Not significant at a 5% risk

### External Evaluation of a New Patient

[0523] Using our method to classify any new patient implies to measure the expression of the 22 genes list by either PCR or microarray technologies, in standardized procedures using the values recorded at the training step to normalize data. Exporting our predictive model should allow an external practitioner to easily calculate the survival risk and therefore the new classification from expression data. For this, successive steps, as illustrated in Table 9, are the following:
[0524] 1 Centering data on the recorded mean corresponding to the measurement method (PCR, GCRMA/docval normalized microarray)
[0525] 2 Scaling in reducing to standard deviation of centroids
[0526] 3 Product of the centered-reduced expression value of each gene by its distance to the class centroid
[0527] 4 Summing those products
[0528] 5 Subtracting training baseline to get each class score
[0529] 6 determine the class with the highest score.
[0530] Steps 1 and 2 are data adjustment, steps 3 and 4 can be reduced to the following equation (the gene name represents the adjusted expression level):
[0531] Low-risk class score=(BMP2×1.141275)+(NRG3×0.053109)+ . . .
[0532] High-risk class score=(BMP2×−0.317870)+(NRG3×−0.119494)+ . . .
[0533] After subtraction of the class baseline, those scores are compared to assess the right class to the highest one.
[0534] All the preceding operations (from PCR or microarray incremental normalization to classification decision are automated through uploading the expression files to a diagnosis and prognosis website already created for other pathologies (PrognoWeb, https://gliserv.montp.inserm.fr).

[0535] Table 9 represents the parameters and risk calculation method to externalize a 22 genes prediction for intermediate grade gliomas

| Provided parameters | | Name | Value | Genes | BMP2 | DLL3 | . . . | NKX6-1 | JAG1 |
|---|---|---|---|---|---|---|---|---|---|
| Centering | Mean 65 samples PCR | A | | | 10.061631 | 11.966334 | . . . | 5.555587 | 11.325967 |
| | Mean 104 samples | B | | | 9.281011 | 8.573953 | . . . | 2.237999 | 10.728599 |
| Scaling | Standard deviation | C | | | 2.594295 | 3.495403 | . . . | 2.396387 | 2.225014 |
| Shrunken | centroids_1 | D | | | 0.141275 | 0.030452 | . . . | — | −0.029803 |
| centroids | centroids_2 | E | | | −0.317870 | −0.068517 | . . . | 0.124023 | 0.067056 |
| Baseline | base_score_1 | F | 0.625548 | | | | | | |
| | base_score_2 | G | 2.483887 | | | | | | |

| New patient (e.g. G533) | | Name | Value | Calculatio | BMP2 | DLL3 | . . . | NKX6-1 | JAG1 |
|---|---|---|---|---|---|---|---|---|---|
| Sample | w expression | H | Input from PCR/Array | | [symbol] | [symbol] | . . . | [symbol] | [symbol] |
| | centered expression | J | | H-A or H-B | 3.400425 | 0.049893 | . . . | — | −1.071109 |
| | scaled centered | K | | J/C | 1.310732 | 0.014274 | . . . | — | −0.481394 |
| | gene_score_1 | L | | K*D | 0.185174 | 0.000435 | . . . | 0.001247 | 0.014347 |
| | gene_score_2 | M | | K*E | −0.416642 | −0.000978 | . . . | — | −0.032281 |
| | sum_score_1 | N | 2.412382 | sum(L) | | | | | |
| | sum_score_2 | P | — | sum(M) | | | | | |
| | class_score_1 | Q | 1.786834 | N-F | | | | | |
| | class_score_2 | R | — | M-G | | | | | |
| | Risk class | Low = 1 | 1 | 1 if Q > R | | | | | |
| | | High = 2 | | 2 if Q ≦ R | | | | | |

Bold: Given parameters
Italic: Input from new sample test
Normal: Calculated or deduced

1-15. (canceled)

16. Method for determining, in vitro or ex vivo, from a biological sample of a subject afflicted by a WHO grade 2 or grade 3 glioma, the survival prognosis of said patient,
said method comprising:
determining the quantitative expression value Qi for each gene of a set comprising at least 3 genes belonging to a group of 22 genes, said 22 genes comprising or being constituted by the respective nucleic acid sequences SEQ ID NO: 1 to 22, wherein said at least 3 genes comprise or are constituted by the respective nucleic acid sequences SEQ ID NO: 1 to 3,
establishing
a first product P₁i for each of said at least 3 genes, between the respective Qi values obtained above for each said at least 3 genes and a first value V₁i, and
a second product P₂i for each of said at least 3 genes, between the respective Qi values obtained above for each said at least 3 genes and a second value V₂i,
wherein
said first value Vii corresponds to the shrunken centroïd value for a gene i obtained from reference patients having a WHO grade 2 or grade 3 glioma, said reference patients having a median survival higher than 4 years, and
said second value V2i corresponds to the shrunken centroïd value for a gene i obtained from reference patients having a WHO grade 2 or grade 3 glioma, said reference patients having a median survival lower than 4 years,
said patients having a WHO grade 2 or grade 3 glioma with a median survival lower or higher than 4 years belonging to a reference cohort of patients afflicted by either a WHO grade 2 or a WHO grade 3 glioma,
determining the survival rate of said patient as follows:
if the sum of the P₁i products of each of said at least 3 genes is higher than the sum of the P₂i products of each of said at least 3 genes, then said subject has a median survival higher than 4 years, and
if the sum of the P₁i products of each of said at least 3 genes is lower than or equal to the sum of the P₂i products of each of said at least 3 genes, then said subject has a median survival lower than 4 years.

17. Method according to claim 16, wherein said set comprise at least 7 genes belonging to said group of 22 genes, said at least 7 genes comprising or being constituted by the respective nucleic acid sequences SEQ ID NO: 1 to 7.

18. Method according to claim 16, wherein said set comprise at least 9 genes belonging to said group of 22 genes, said at least said at least 9 genes comprising or being constituted by the respective nucleic acid sequences SEQ ID NO: 1 to 9.

19. Method according to claim 16, wherein said set consists of all the genes of said group of 22 genes.

20. Method according to claim 16, wherein
if N1>N2, then said patient has a median survival higher than 4 years, preferably from 4 to 10 years, more preferably from 5 to 8 years, in particular about 6 years, and
if N1≦N2, then said patient has a median survival lower than 4 years, preferably from 0.5 to 3.5 years, more preferably from 0.5 to 2 years, in particular about 1 year, wherein
$$N 1 = {\sum }_{i = 1}^{n} ( {P}_{1} i ) - {T}_{1} = ( {\sum }_{i = 1}^{n} ( ( \frac{Qri - Qci}{Ji} ) \times {V}_{1} i ) ) - {T}_{1} ,$$
n varying from 3 to 22, and
$$N 2 = {\sum }_{i = 1}^{n} ( {P}_{2} i ) - {T}_{2} = ( {\sum }_{i = 1}^{n} ( ( \frac{Qri - Qci}{Ji} ) \times {V}_{2} i ) ) - {T}_{2} ,$$
n varying from 3 to 22,
wherein
Qri represents the quantitative raw expression value measured for a gene i in the biological sample of said subject, and
Qci represents the mean of the quantitative expression values obtained for said gene i from each patient of said control cohort of patient afflicted by a WHO grade 2 or grade 3 glioma,
Ji represents the standard deviation of the centroid values obtained for said gene i from each patient of said control cohort of patient afflicted by a WHO grade 2 or grade 3 glioma,
V₁i corresponds to the shrunken centroïd value for said gene i obtained from control patients having a WHO grade 2 or grade 3 glioma with a median survival higher than 4 years,
V₂i corresponds to the shrunken centroïd value for said gene i obtained from control patients having a WHO grade 2 or grade 3 glioma with a median survival lower than 4 years,
T1 corresponds to the training baseline value for control patients having a WHO grade 2 or grade 3 glioma with a median survival higher than 4 years, and
T2 corresponds to the training baseline value for control having a WHO grade 2 or grade 3 glioma with a median survival lower than 4 years.

21. Method according to claim 16, wherein the quantitative expression value Qi for a gene i is measured by quantitative techniques chosen among qRT-PCR and DNA Chip.

22. Method according to claim 20, relates to the method as defined above, wherein, when the quantitative technique is DNA CHIP, Qci values for a gene i are as follows:

| Genes | Qci |
|---|---|
| SEQ ID NO: 1 | 8.1111 |
| SEQ ID NO: 2 | 8.6287 |
| SEQ ID NO: 3 | 6.0748 |
| SEQ ID NO: 4 | 7.2020 |
| SEQ ID NO: 5 | 9.2810 |
| SEQ ID NO: 6 | 9.1734 |
| SEQ ID NO: 7 | 5.0310 |
| SEQ ID NO: 8 | 5.1660 |
| SEQ ID NO: 9 | 5.1174 |
| SEQ ID NO: 10 | 6.3898 |
| SEQ ID NO: 11 | 8.8992 |
| SEQ ID NO: 12 | 2.2380 |
| SEQ ID NO: 13 | 6.9486 |
| SEQ ID NO: 14 | 6.6286 |
| SEQ ID NO: 15 | 13.6886 |
| SEQ ID NO: 16 | 9.2036 |
| SEQ ID NO: 17 | 8.5740 |
| SEQ ID NO: 18 | 10.7286 |
| SEQ ID NO: 19 | 4.8529 |
| SEQ ID NO: 20 | 8.0629 |
| SEQ ID NO: 21 | 4.8347 |
| SEQ ID NO: 22 | 6.3091 |

23. Method according to claim 20, wherein, when the quantitative technique is qRT-PCR, Qci values for a gene i are as follows:

| Genes | Qci |
|---|---|
| SEQ ID NO: 1 | 9.8895 |
| SEQ ID NO: 2 | 10.7617 |
| SEQ ID NO: 3 | 4.8934 |
| SEQ ID NO: 4 | 8.6122 |
| SEQ ID NO: 5 | 10.0616 |
| SEQ ID NO: 6 | 9.1961 |
| SEQ ID NO: 7 | 7.0401 |
| SEQ ID NO: 8 | 6.7866 |
| SEQ ID NO: 9 | 7.4768 |
| SEQ ID NO: 10 | 8.4759 |
| SEQ ID NO: 11 | 8.4640 |
| SEQ ID NO: 12 | 5.5556 |
| SEQ ID NO: 13 | 9.2268 |
| SEQ ID NO: 14 | 7.4760 |
| SEQ ID NO: 15 | 16.4164 |
| SEQ ID NO: 16 | 7.4201 |
| SEQ ID NO: 17 | 11.9663 |
| SEQ ID NO: 18 | 11.3260 |
| SEQ ID NO: 19 | 9.2557 |
| SEQ ID NO: 20 | 8.4543 |
| SEQ ID NO: 21 | 6.9780 |
| SEQ ID NO: 22 | 7.2556 |

24. Composition comprising oligonucleotides allowing the quantitative measure of the expression level of the genes of a set comprising at least 3 genes belonging to a group of 22 genes, said 22 genes comprising or being constituted by the respective nucleic acid sequences SEQ ID NO: 1 to 22,
wherein said at least 3 genes comprise or are constituted by the respective nucleic acid sequences SEQ ID NO: 1 to 3.

25. Composition according to claim 24, wherein said set comprise at least 7 genes belonging to said group of genes, said at least 7 genes comprising or being constituted by the respective nucleic acid sequences SEQ ID NO: 1 to 7.

26. Composition according to claim 24, wherein said set comprise at least 9 genes belonging to a said group of 22 genes, said at least 9 genes comprising or being constituted by the respective nucleic acid sequences SEQ ID NO: 1 to 9.

27. Composition according to claim 24, wherein said set consists of all the genes of said group of 22 genes.

28. Composition according to claim 24, wherein said composition comprise at least a pair of oligonucleotides allowing the measure of the expression of the genes of said set of genes belonging to said group of 22 genes.

29. Composition according to claim 28, wherein said composition comprises at least the oligonucleotides SEQ ID NO: 23-28, or at least the oligonucleotides SEQ ID NO: 23-40, or at least the oligonucleotides SEQ ID NO: 23-42, or at least the oligonucleotides SEQ ID NO: 23-54, chosen among the group consisting of the oligonucleotides SEQ ID NO: 23-66, or said composition comprising the oligonucleotides SEQ ID NO: 23-66.

30. Kit comprising:
oligonucleotides allowing the measure of the expression of the genes of a set comprising at least 3 genes belonging to a group of 22 genes, said 22 genes comprising or being constituted by the respective nucleic acid sequences SEQ ID NO: 1 to 22,
wherein said at least 3 genes comprise or are constituted by the respective nucleic acid sequences SEQ ID NO: 1 to 3, and
a support comprising data regarding the expression value of said at least 3 genes belonging to a group of 22 genes obtained from control patients.

The application's sequence listing, which the Patent Office published only in electronic form, follows.

SEQUENCE LISTING (330 sequences)

SEQ ID NO: 1 - DNA, 9019 bp, Homo sapiens
aataatcagcatgtaaattgcaaaaaaaaaaaaaaaaaaaaaaaaaaagacacgggcccaaaagggagcgctcagtttcaggctctttgctttccttcctcccgaggctctctggcccttacccagcctgaagacagaaagtgtgagggggagggtaggaaggtaggtcaagcagggcaatgctgagcctgggaagaaaacaacagccttgtttagggcactgtggcttacgtaactaaattgtgcccagtttccacctggccaggggcctggagtgaatgctgaagatgcaaaggtagaggctgccagaaaagccaggaaattgctggcaagaaaggccagtggtggggtgcaggagtgggaggaaggctgggaaatgcggctgagtcacatctccagaagccccccatcatcaccctagtggctcttctgctggcaggtgcctcatgaagacctgacccaaagttttcaaaactctgcggtttctcaaccctcctctggtaatccatagtactcccccgcctccacttgccagcctcgtgattccttcattgacacatagctcagttcccataaaagggctggtttgccgcgtcggggagtggagtgggacaggtatataaaggaagtacagggcctggggaagaggccctgtctaggtagctggcaccaggagccgtgggcaagggaagaggccacaccctgccctgctctgctgcagccagaatgggtgtgaaggcgtctcaaacaggtatctgggctagccaaggttaatccatcagagttgtgggttttcaggcccagacagcccgcagagccatctgcctgctgggtgagggactaagggagtgggcagagggggaggagaagcagagccaggggagggactgaggctgcaaccaggaggtgggggtgggggaggtgggtctcagttgcttgggggagggagcagggcggaagggcaggatgcacttgcaggggtctcatcctggatttctcttcaggctttgtggtcctggtgctgctccagtgctgtgagtaatccctccacctccacttttaagtccagaggcgtggcgagggcacagggcaggtgtggaggaggtcttagctccaagggaacactttgccaggttcttctgtgcttccaatgacttcgaaatagtcacgtttgctaaactggagtgaggagtatatggatgtttattttgctatactctttggtatatgtgaaaattctcaaaataagaaactttaaaaggtcctggttcagtgaaggctttgactaacagcccctgggagccgctagtacagttgcccagtagctgcttggatgagtgatgcccacattgtttgcagcaggagaaacagaattagaggcgaggaaggatttcctggtccattgtgatattgtgccccagcctgggggacatgccgagggagcacaggactgccattccgggtgggttacaagttagaggcactctcaccaggaggcagagaaaggtgggccagagtccctcatggatgaaggacctcactgcaggtcactaaaggtgccagcctgaaagccagggccatctgtgacacaggctatcttgggccttcccctcccacaaagccactgcttccaggaagcctgctgtgctggcaccaagtcccatttcatccttattccccagctcctacccttcccccacacagtgcctgtagcgtattcatcccctgcattggatcttttctaagcattttcagaataggccttattttcaccagtcagggaactccccagaggcagggggacctgaaccagctcctttcatttaagaattctgactttgctcacaatctgcaccccactcctccctacccaaccccacaccccattggtgctcagctctgggctcagcctgaggtctcttgccgaatcctggcccgggccccatcccagacttctccttcaggctctgcatacaaactggtctgctactacaccagctggtcccagtaccgggaaggcgatgggagctgcttcccagatgcccttgaccgcttcctctgtacccacatcatctacagctttgccaatataagcaacgatcacatcgacacctgggagtggaatgatgtgacgctctacggcatgctcaacacactcaagaacaggttgggccagggctggccaggagaggagggaccagctgggctggtcccagggcagggcaaccccacccaggaggaagggcgaggccccaccctgctcacctatgtttggagagttagaggggcttggcttaaatgggtggaggggatgactgtaggtgctgggcaatatttggggtgatgagagactgtagacggaagcgcagctgagcccctctgggagaggggaaccctctcctgcccctaacgtgctctccagggagcatggaaaatgagcaagactctactttgccatactctgtcttctccactggggaaaacaaaaatgggcagcagacctcagagtaactcccatgaagcctgtgacccctcagagatccaccactatgaatctctatgggattcccatgatgtcctatgggaggacatcagcggcctaacccagcctctcacccaaagcaggaaaccttctatggcctctcagacatggggccacccagtgtcatgacaatgtcattccactcctgccctccccacctccctgtgctccacaggaaccccaacctgaagactctcttgtctgtcggaggatggaactttgggtctcaaaggtaggagcctctccccaggggcaggacggcagaggatgatggcataggagtgaggagcttgggtctcccgcatccactgtatggatgttccaggggctccagactagataggtacaaggcctacctgtttgtcaagggcctgcctgatgtgtagcaaagaaagcagagcccagagagagagcaggacttgccaagagtcacacagcaagttaacagtggatctcccaattccctgccaatgctctatttactacctcacaggcccgaaaatatgggacttctggggctaccaccattagggctggaaagagagagatggaaaccaatggggacattgagaagtggggagaccctgggaggagtctttggattaggtggggttggagcagggcttgaaatgggggtggttatggccatcgttggcacccatgtgctgggtactctttctgtgtccagcaccctgtctccccatgatcccatgttgtcctcacaacagcaaggtgagctgttatatttgtccccattttacagatgatgaaactgagactcaggttataacctttcacagtggctggctagtaagtgatagagccagacttggaaacctggaatgcctggctctaaggcacatgcatgcctggaggcgacccctgtcccaatcatgccctcccagagctgtgtggcctcaggatcccagctctgcaggtcctggaaaccccaccagaggcccaaggcacctagcatatcagtgctgagcatgctacagggctgattttggtcctagattttccaagatagcctccaacacccagagtcgccggactttcatcaagtcagtaccgccatttctgcgcacccatggctttgatgggctggaccttgcctggctctaccctggacggagagacaaacagcattttaccaccctaatcaaggtgctggtcaggtcagggacagggagggaggtgggcaggcatgagggaatggggtgggctagaagccggcgtcagctgctgtcctcctgaggacaggtaaagagggacttcagcctcagggcagtgtcctgggaccctgtgccctgaagatctcacatagcaaggaaggcttcttgtgaccatggtgggaggtgggaatggggttctaagaggtggaaggttgtgactgagcagagcacccacttataactacccacttagtgcattgcccattgcccacccttcaatcccatactgatgccacccatacccagcatgcactgtgtccagcagctctcagctctgcctgggggcagcctaagtatctccagttaccaggggcagaaggagagtctaaacaaattgttcacaataccagcagcaatcactttaactttgggatttcatgcaccagctagaacaaagcacagaccgaaaggcaaatgtctcccaaagtcatctgtgggccaataggggtcacccactgtccgatgctccctccaggacagggagtaattgagtgctgatgggtgtgcatgggtttggggagaagattagtcagttttttaggaaaaggatgggtgacttgaggatgggaccactgatgagccactttatcacttccactaggccccaggcaggttggggagtacagcaaatgggttgcgcagagacctagtccgccctcgatgagtctacctctcatgccacttgggaccctttctctcacctgcctgtctcccatctaggaaatgaaggccgaatttataaaggaagcccagccagggaaaaagcagctcctgctcagcgcagcactgtctgcggggaaggtcaccattgacagcagctatgacattgccaagatatcccagtgagtctcctgccccaggcagcctccccagaacctctgccaacactcctgtttccccgccacccccagccctagcactccatgtagactgaggacactgggcttccagtcccagttcttccaaagccttgatgtgtgaccttgagcaagtcacttccctgccctgtgcctcagtttccccatctgtcaaatgaggcataacaatccttgcctttcctttttcacctgggctgttggctgagcagttgagagagctgctatgaaagtattttggaaagggaagtggaaaaagctattcaaaccctccagctattgcagagtattttctccacaccaggcagagcagagtgctgggccctggagaggccacacagcagcctctttctagagtgctggggagtcctcaaggctctctcatacacacaggcctccccctttcctgttggccccacgcctcatcctcaccccacccctcatgcctgtgaggaacaaggaacagccaagcagcctcatctctcctgagagcagagccatgggtctcgggaaacccaggagtaaggaacaaagactcttcaaaatgacttcagagctttctttaggatcccagggaggtgtaaactcagtgcttaattaaatggattctttagagggtgggaaacaggtggatgtcaaccatttgccccacatacccgtattcatgcaatccacccccagtgggctcaccggtgcgggtgtgcaaaacctcctcccaccccagtcatcttaggttcaggtcatcctttggtcctgctctttccccgccaggctgtctgttgatgctacttttaatctgctttcactaagataagcctggcagaagtggtgggggtaaggtgggctgtaggccagctcccaaatgtgtgctgggcataacagaagacccattcttgactgaagtgcccttgtgggaccctgagcccgtgccctggagtggcacagggaggtgtgccagcaatggggaccgaggtcactggggactgctggggttcgggctagtggcctgtctggctgctgtctgcttccctcgttcacatcctgctggagccttaaataggagcccaaaagcttttctttcttacttttttttgagacaaaatctcactctgttgcccaggccggagtgcagtggcacaacctctgccgcctgggttcaagcgattctcctgcctcagcctcccgagtagctgggattacaggtgcctgccaccatgcctggctaattttcgtagttagagtagagacggggtttcaccatcttggccaggctggtcttgaactcctcacctcatgatccacctgcctcggcctcccaaagtgctgggattccaggtatgagccaccacgcccggcctaaagcttttctattaataatttcctgcctcaccctccatccccttcctcctcagacacctggatttcattagcatcatgacctacgattttcatggagcctggcgtgggaccacaggccatcacagtcccctgttccgaggtcaggaggatgcaagtcctgacagattcagcaacactgtgagttcccagaaggagggagggccaggagggggccgcaagacctgccatctgccagtgctcacacaccaatctctctagccctcagtacagtcctgcaagaggggggtcatgaggcccattccacagataaggaaactgaggcccaaagtctgggcatgctgcgttgctctgggaaggtgatctgcagggtaaatggagtgagggcagggggccgaatggggagaggctgggagccgaggaggtaggagtcattgtgccctcagagccaaccacctgatttctgcatctgtcaaatagtaatagccccttcctatgcctcaaaggatttttttcaagaatgaaactgtaaaattcactttaaagtgacatgatccgttcccggagggacaggggaatccccagtgcaccatacaccaataacccctgctaaggcagcagtattaattgctcaaccttccgcacctgtgcactaactgctcacgttgttcccaccctaccccacccaggactatgctgtggggtacatgttgaggctgggggctcctgccagtaagctggtgatgggcatccccaccttcgggaggagcttcactctggcttcttctgagactggtgttggagccccaatctcaggaccgggaattccaggccggttcaccaaggaggcagggacccttgcctactatgaggtaatggagttggggagaaggtaggattcccccacaccaccagcagccctggggaaggtgattccccaccacgttcttgctttttctcctttgggaataaagaaaatgtccggttgccccagcatgcctgaggaagtggaagggagaggttaggacatttgttgctgaaaatctccagcaggtacaggcacatgggcctgcaccactaggcacctgggatagccctctggctatggggctgaggtcttccttccagcccaggaaagagcagaggtcaagaggcagattttttgtttcactctagcctctgctactctgtgtggccttgggcctgtcctcagtgtcaaccagcaggcctcacatctctgtttaaatggaagaagctaagcagggccaaggcagccaccatctctgggtcatttgcctctggtttgtataaacttgtgtgatgcatgcagcctgcagaccctgcagagagtgaggctgcaggatggagcaggagctaaaagagatttggagagtggcgtctcctggtgacctgcaaggtctcggcacgactccccacactgccttttccctgttatctgctcagatctgtgacttcctccgcggagccacagtccatagaatcctcggccagcaggtcccctatgccaccaagggcaaccagtgggtaggatacgacgaccaggaaagcgtcaaaagcaaggtaggtttccccaaggccacacctcaggacaaagagaaagaaggaggccccgctcccagcagccagattcctgtcccttgcactgaggtctgggctgggctcacagagcacatgtgccctgtacacactctgggtcagggaacccagccctgctcctctgggcctcccctgccaggtgcagtacctgaaggacaggcagctggcgggcgccatggtatgggccctggacctggatgacttccagggctccttctgtggccaggatctgcgcttccctctcaccaatgccatcaaggatgcactcgctgcaacgtagccctctgttctgcacacagcacgggggccaaggatgccccgtccccctctggctccagctggccgggagcctgatcacctgccctgctgagtcccaggctgagcctcagtctccctcccttggggcctatgcagaggtccacaacacacagatttgagctcagccctggtgggcagagaggtagggatggggctgtggggatagtgaggcatcgcaatgtaagactcgggattagtacacacttgttgattaatggaaatgtttacagatccccaagcctggcaagggaatttcttcaactccctgccccccagccctccttatcaaaggacaccattttggcaagctctatcaccaaggagccaaacatcctacaagacacagtgaccatactaattataccccctgcaaagcccagcttgaaaccttcacttaggaacgtaatcgtgtcccctatcctacttccccttcctaattccacagctgctcaataaagtacaagagcttaacagtgtgttggcgctttgctttggtctatctttgagcgcccactagacccactggactcacctcccccatctcttctgggttccttcctctgagccttgggacccctgagcttgcagagatgaggccgccatgtcctctgcctagccgcagagagccccagtgggaggccagcgtcctcagattcacctgccttggacttaacccaagcatggctgatggccttccaaatattaaagtcattgccatccagatttctaaattaaattccctgttgaaagaaacgttttctgtttcctgaaggctagcaggccctgggaaagaaggcttttcatcccaacactccctctcttctgatccacaggaaggtggtgggagctcatcacaggaccaggttagaaagccctgaaccctggaccctcagggccagcaggaaatgcagatgtcatctcatgcacccttcctgcctctcgggactggagtccctgcagagtgcttgagagatggccctccagcctcccagtgaggggcagccgattaccttggaagcaacccattccgtggctgggctgaaatctgtcaatagtcctagtgctgggcttagccc

SEQ ID NO: 2 - DNA, 32809 bp, Homo sapiens
gcatctaggtcaccttcagagccaggtggccattgggttaactagctgttgaactgaatcaaacaggctctgagccttgaagtcagaaagagccagagtggaggggtctggggggaagaggggcgctgaggtatagggagatgaaacctgcggtggaggcagcttaatggtccacctgtcacccaaggaatctctctgacaggggtctttgttagggtcacaccccaggagatggttgattatggctgagtccagcctggaatgatgggggttgggggcagcttgggtagatgactcagtaaatcaaacagaacaatgaaaggaggtcatgcttgtccatctgcattattgaagacagccataaatggccttaccccagagcgggtctgtcacacctggagagctgatctgacctctccaagacccctgcaactgagtgttctgggatctgtcctgcaacaagtgcctcgagatttgtaggtgggggcccagggtgctaagggattattttagcgggcggagaagggagggggtctgcagacgaagggggcaggttttgcggggcacttagggttctcataggttgtagtcacgagctcccaggtttggaaaactgcaatagtcactaagaccattcggggctgtttgggtctagcttggtctagacgggtctgaaactccgcaggacccacccaacaagaagtcattgttccaagccacgtgtcagtggtgggtgataccccaggatggaaggagttggtatgagccgactgaaatctacttgaaggtcaaaacggagccttatgtcttttgtgttccccagcggttagcccagtgccggccacaggggaagcgcgcaaacgaagtcctcgcgaactgaactgagagcagacaaaagcacgcgctcttctccaccgccacgccggtcctacccaaacccgcgagttatccgtattctccttcaggagtcatagtcaggccagaagagtgcggagggacggggcccgggaagagcagggaacccccagagcccgcagccaacgcggaggtgggcgagcgggcgtgcgcgcactcacttgccggcgcgagggagtgtcgggggggaagggagtggtctccaaaagggggaggggagaaggcagggggcggggagaagccggccctttaggacccggctgcggcggcgagggaggaggaagaagcggaggaggcggctcccgcgctcgcagggccgtgccacctgcccgcccgcccgctcgctcgctcgcccgccgcgccgcgctgccgaccgccagcatgctgccgagagtgggctgccccgcgctgccgctgccgccgccgccgctgctgccgctgctgctgctgctactgggcgcgagtggcggcggcggcggggcgcgcgcggaggtgctgttccgctgcccgccctgcacacccgagcgcctggccgcctgcgggcccccgccggttgcgccgcccgccgcggtggccgcagtggccggaggcgcccgcatgccatgcgcggagctcgtccgggagccgggctgcggctgctgctcggtgtgcgcccggctggagggcgaggcgtgcggcgtctacaccccgcgctgcggccaggggctgcgctgctatccccacccgggctccgagctgcccctgcaggcgctggtcatgggcgagggcacttgtgagaagcgccgggacgccgagtatggcgccagcccggagcaggttgcaggtaacgcggtctggaacaagtagttgggagaaacttggagggcagcggagaagcccgacgggcggctggaccttacggacggttttaggggcggcagagccgagaccttggaccaaatcaagggggactgttgctagcgggacgcggaagtcaggcccggggaggggaactggagttagagcaagtggaagagccctggcgactcatttggtggggatgaatggggagaggaaaggcatccctgctgccatagttttacccgcgtggaacggacccagacttctattctggaggagggatttgctgagaagggggccggtggtcagatccatgggagtaggaactcgaatcttatttggggcactgcttgaggacccaagggtcctggtgggatcgctgctgggaggcggaggctgcggggtgccagtgacaccaggaaccttggaagaggagagggagctaggaggaggcaccggcgtcccaaggggcccttccttctactggggttgtgagttggaaagaaaggacttggtactttgtaggatgagtcgcttaggagaaaaatgaaaaccaccactactatttctccatagggaacgagcagggctcttgctaccacgttgaatggaaaaataaaagggaggcatttggtaggcgaggggtctcctagcagctgaatcaatgtaacttaagcccgatcgccggctgcattccctggacgggggcagccaggctgtgcggtttcgcatctgggccccagatcgaaaggcaggagagatgcgttgccaccccccacccccgcccctatcttaaattgagggaccctttcctgtaggatagaatgaggacccgatattctttgttcaggggccctcatccctcccaaaaagttatttgagggacacaaccaggctctaaggaggttacttttttttttttttaattacgaaagcctcctgccccagtggtcgggaggaagctgtaattattttctttcctcttggagacagtggtgaaatgtgtccactgcctgctgctgttgttgaaaaagcaagtgagtcttaagtttctcaaacttaaaaagaaaaagtgaaaagaagaatgcttgctttttagcttctgaggtcttcgtaagccccccaccccatgcaccaacccgcctcccttctcctggtcggctattgtttttttccctgttctccttgagaatggaattaggggtcagagttgaaatctttcttctgtttctctagcacattttgctctggagtacagagcaagttagggcttcctctgagtggagcctctcagtccctttcttctccctcggctcgcttccttccctagcctgcctggaagttaacccttccctcctgcttctcttagaaagtaacaataaaaggaaaaagcccccacgaaatcctttcactgcggggtgcctgtcccccagtcatgcgttcctcctcatcacccctcgtggtccaccggggaggtgctgtgcagtttctgagctgaactctgacaaactaaacatcttcctcagcagggtgaactttttgaaaggcctctaagttcataggatggtttggctgctgactgttttaataaagtgtgtgatgcctttccttctttaacgttttacttttttttttttcctactcttcattcgtcttattctaagcctgaaaaccaattctacttcccaaatccctgaagccggttagggtctttagccaggaacagatgcggcagattttctcccattcacttttccctggagcctgaagggggtggggggtagttgtcaggggaggccagggacaatggggtgagttcatgggaagaatgtcactctggattttctgcctggttatgggactcccttccgccagcttgccccagctgcgttctcctccccagtgcccagacgccttccgcatttttgtgcaccggcctgggaagaggggatgttaagcaggggtggaaggtggggggtggggctggaagctgagtgggtgcactcaaaagaagtgaccaatgtcaggggtgcctgagaaagagtcgggctgggggaggggagcactttgggaaggagcctgagcttgcaagggtgcaggagaaaaaggggtcaaggttggaggcttttgtgtgggagagggtcttaggctggggcagagactggagtcactggatggagagtgctgggtccgagttgggtggggcctggcccagacggagatcttagcactgaatcctctgcctcccactccatctcccgtcccgtcttctctcctctccgaagaatgagcaccccccctccagcctgcattcctctttgagcaggttgcttttgagaattttaaacataccctcttatttcgaggcagcgaacctcagcagttccggctttgctgttagctcttttgtctttgttcccgggactcaggggctgtgttgctgctggcttcctggggatggcaaggatgcaggggtgggggtgggcacatcagtgggtggaaggagtgggtggtggtgagcctgtatcccacggggacgatgggctggggcttgttggttcaaagaaactgagaagtcagtcttgggggaaggggtgggtaggcctagaagaaaaaccgaaaggagaccctgagatctgcttgaagttgggactctaaaagcgtgtgtatgtgtttggtggtggagtggatagaagtgcctagaaatgtcagggtcgaggagggaacagggttgggccagtccaggccctttcagaattaaggctgggctagaccggttccttcagtatctccccagcctccttccctaccgtgtacaatgcaggggattatgctgaggggcggggccgcccgagtggccgtttggcccgctgcacgtataaaggtgctacagaaatgtgtagtcgttcaaagtcccagggcgggcagacaggcaggcaggcaggcgggcgggcgggcgggcgggcgggcctggggaggctctgcatctgcagttgccggggaagaataaaggggggaagaggcaagcactgatttacagtggttcagtgcagcttcaaaaaaaaagggggaaaaagcaatgggacttctggctcagagtactgctttgcatctcgtcttgcataaatttgcatactgagttcaaagtcgtaaaatagactagggaaatgagtgggatctactgtcactgattgttaacaccactaccttccacctcccctccccccatctggacagaactcccggcactagttctgctaagcagcgctgcctgagtcaccagtcaccactgttcatgaaagaaggagatggggaagcgcctgtctaggagaccaagcagggtgtggcagtgtgcaccctggcctcggaggcagggcctctctgaagggtgtggcccgacagattctggaccagtgaggcaagtggtgttctttctgacgcctggggctgccgttgcccatggtgggctgcagtttgaggaagctgcagaatccgggtcttctttgtttgaaatttccctactcagcttccacatatgtccaaaacatttactgtgataagtccctttgtgtggtggtaatgacccacttctttagacaagatatttgaggaaggttcgagaacagaaaaattctacttaacaatgttaaggaatctgagaaaagtggggcacaggagtctctaggttagaataggtggtagagcctggaaggagagaagaacccatctgttgtattcccgagggtctgcccacacaatggctcttggccaagtggactgttgagcttcctgtcaggcagagggaagagggaggcttagatagttctcactgttggcctacttcagcactgagcttcaagactttcaggcaaatcattccttcaggctcagaggctggaaattagttctataaaaatgccatggggccggtcgcattggctcatgcctgtaatcccagcactttgggaggccgaggcaggtggatcacaaggtcaggagtttggagaccagcctggccagtatagtgaaacctcttctctgctacaaatacaaaaattagctgggcatggtggagcatgcctgtagtcccagctgcttgggaggctgaggcaggagaattgcttgaacccgggaggtggagcttgcagtgagctgggattgcatcactgctctccagcccgggcaacagagcaaaaaaactccgtctcaaaaaataaataaaataaaaatgccacgggttggccaggcgcggtggctcacgcctgtaattccagcacttagggaggctgaggtgggcagatcacctaaggccaggagttcaagaccagcctggctaacatagtgaaaccccatctctactaaaaatgcaaaaattagttgggcatggtggcacctgcctgtagtcccagctgctcgggactctgaggtaggagaatcgcttgaacctgggaactggaggttgcagtgagccgagatggcgccactccactccagcctgggcaacaagagtgaaactccgtctcaaaaataaaataaaataaaaataaaaataaaaagccatgggttacctgaaagtaggagcatatccattcactcattatctgacctttgagggctgacttggagagaactgttctctggcccagtcatcaggtggcttccagttggttctcagctgggctgttcacacccatagaaaatgggaggtacgactgttcaatttctttttttttttgagacggagactcgctctcttgcccaggctggagtgcagtggtgcgatctcggctcactgcaagctccgtctcctgggttcacgccattctcctgcctcagcctcccgagtagttgggactacaggcacctgccaccacgcccggctaactttttgtattttttagtagagacggggtttcacagtgttagccaggatggtctcgatctcctgacctcatgatccgcccacctcggcctcccaaagtgctggggattacaggcatgagccacggtgcccgaccaggctaatttttttttttttttttttttttgagacggagtcttgctccgtcgcccaggctggagtgcagtcgcccagcctggagtgcagtggcgtgatcttggctcactgcaagctctgcttcctgggttcacgccattgtcctgcctcagcctcccgagtagttgggaattcacgcatgcaccaccatacacggttaatatttttgtatttttagtagaggcagggttttaccatgttggccaggttggtctcaaactcgtgaacctcaagtgatctgcccgccttggcctcccaaagtgctgggattacaggcatgagctaccgcacctggccacaactgttcgatattgatatgaggaagttctgaaaattctgcaccaaagggaatggagaacaggtaaatacctatgatgcctggcaggataggacagggggctgctgaaaggaatgaaggaggagcagaacaaaaaggggctgtgaggccacatccacatctgcttttgttgttggtccttcccgcgtactagaagactgtacccaaaagaaaagaaaaaagcttgttttttttttgtttgtttttttgtttttacaaagagtctgtgtatctgggaattgttatttttatttgtattattatttttattcatttatttatttcaagaccgagttttgctctgtcacccaggctggagtgcagtggcgcaatctcggttcacggcaacctctgcctcccgagttcaagcaattctcctgcctcagccccccaagtagctggaattatagacacctgccaccatgcctggctaatttttgtatttttagtagagacaggttttcaccatgttggccaggctggtctcgaactctggacctcaggtgatcctcccgccttggcctcccaaagtgctgtgagtacaggcgtgaaccactgcacctggcctattttaattttttaaggaactctgtatccagggagtgcatttcgtctcagcctttctctgtatgttcccgactccctcttcctcctcctgccttctccatgctgtcctctttgtccctgcagaccattctttcctttcccacacttctcccttccatgcctttcctactccggctcagctagaacacctgcttgctaggtaggtgggtggggctcaaaaatggtgtggaaaatatagtggtctcagcctcagagatccatccaatcagagggatattatgtaggtgactggagactataatgcttgaaaaaactagaatccttaaatgaggagggtggttgactgggctttgagggaaaggacttctataggccagggaatgggattctctcctataagagttagcactagcgctgcttctgctgaaaccaaggcatagaagcgggagatgatgtttgaattcatgagggaagctggtaacgtggttggcagatattctagatccctctgcttatcctgtctctggccagcaattcactgagatggcaggcagccgccaggagattggtggtgctcgcatctgtcctcaccctattatgaactggcttctgtgcctgctttgtctcctgtcttccacctccctgcgagggaggccgttctacctccattttgcaggtgtggacactgggtgactcagcgatacgaaaatgctgagaggctaacctgggtaccttcccactgcacccctctacctccgtggccgggtaaggagttgggctgttggtagagaaaagcttttgaccgtatcaaccagcagttttgttcctggacagctgccatgtgcaggtgatgtatggggcacagtaaatttctgccagatttcaattatgtagattcccttgactccatggacagttacaagtcctggagtttggggacctcacagttgtaagtagccagcatacagaggtcagtcaagagggacaagaaggtcacagggtgggcctcttgagagaagagctgctgggtagcagatgatggtgcaggcagcctggcctttgctgtcatattgaccggggttggttccattgcaaccctgtctcttaatacttcagtagttagtaaggctcttcctccaatgccagttccctgttggtaaaatagcaatgattttacctctttcccagggtgcgtgttggggtggctgtgataatggcaagtacctggcacatagtatgttcttgtacatgttagctgccttaatcttggcaagtgacatctcctccttgacaattagctggcctttaaaatgaaggccaaactggaaaggtcaggcaggccactcctctctggaggttcaaatcccaggtggtctaccatgtactaatcacccaaggtaagagatttcttgctaagcctcagttttcttatttgcaaatcagaaattgatagtatttcattgggtcaactacacagatgtgtgtaaagatataaactatatataaaacctaagctcttgcattttggtgatgagtcacttgatttccatctcttcacctatgaatggaaatatccatacctctccaacctactttcacagggctgtagtgaggtggtttatggaaagggcaatgaaactgtactttaaatgcaatacaaatgcaattgataaatgcaatataaatgcaactgataagtgcattataaatgcagtgcataaacggttggagaccatcgggcttgcattttttttttttttttttttagacagagtcttgctctgtcgcccaggctggagtgcagtggcgcgatctcagctcactgcaagctccacctcctgggttcacgccattctcctgcctcagcctcccgagtagctgggactacaggcacccgccaccacgcccggctaattttttgtattttttagtagagacggggtttcacagtgttagccaggatggtctcgatctcctgacctcatgatccgcctacctcagcctcccaaagtgctgatgattacaggcgtgagccatggtgcccgaccaggcttacatttttttttttttttcgtgagacggagtctcgctgtgtcgcccaggctggagttcagtggcacgatctcggctcactgcaagctccatctcccgggttcatgccattctcctgcctcagcctcctgagtagctggactataggcacttgccaccacgcccagctaattttttgcatttttagtagagatggggtttcacagtgttagccaggatggtctcgatctcttgacctcatgatccgcccacctcggcctcccaaagtgctgggattacaggtgtgagccaccccgtctggctaggcttgcattttttttttttttttttgagacggagtcttgctctgtcacccaggctggagtgcagtggcgcgatctcggctcactgcaagcccgcctcctggggttgatgccattttcctgcctcagcctccccagcagctgggactacaggcgcacgccgccacgctcggctaattttttgtatttttagtagagacggggtttcaccgtgttagccaggatggtctcgatctcctgaccttgtgatccgcccgcctcggcctcccaaagtgctgggattgcaggcgtgagctaccacgcctggcctaggcttgcatttttaatggattagttgggcagtgctctttggatccgatgtgctgatgtctaggactgactgtttttggtatgggagcttctgtctgcagtgtctagaatgggggttggagggactatggggaacagaggtggccccagagcttggacatctgggttctcatgctggccttgctgctcataagcaggtaacacagggttgagttcctcctttgcctggccagccaacctggaagacctagccttctggctgtcagtgtccagagctctggagaatccctgaggctacatctctgggtgggggaaggtcctctctgtatagatggccctccaggggaagtctgcaaggatccagacttcagaataatagagttaagtattaactaatccaagtggtcctagcacatttagcacatatggcatgctcaagggtgtgcaattgtgcagtcatcaaagccagtgagggcacccgatgccacccatttcctgcaccaggaaaatggacctttcacgtctctgaacctgggatgccagaatgcactgaacttgatcctggcaaataaattggaagctgtttccaaaaaagtgatatgttcttgctacattgtctccagagtttactcctgagttggggagcagcatctcattttgcaaggggctgttggattctccatagaaacgctgggttgggggagtgtcttctgagtactggggctctacctaatgtctgattccatctgtggtaccaaaaagccctctgaatggcagcctgtctgtgcacaatgatgccgaagactttcttttccagcatctaatgaggcatggccccaggaaagcagagaaggcggatgcttgagtctctgagggtcagaatacgcttatggtgaaatcagaactggggacaaggcaaagtactgccattgggaatccggggtggatggtcatgttagaccaggggtgtccaatcttttggcttccctgggccacttggaagaagaattgtcgtgggtcacacataaaatacactaacactaaccatagctgatgagctaaaaaaaaaaaaattgcaaaaaaatctcataatgttttaagaaagtttacgaaattgtgttgggccacattcaaagctctcctgggctgcaggttggacaagcttggcgtagactcttggagggctttcatggtggaggcaggaaaggaaaagccccttttacagatgggatagtaggtccagagaaatgtgttggttttcagttccagagtaatttcacctgctcccaccctccacactcacaaagagcaggctgggtgggatgtcgatttttttttcttctggagaatggaccatctccctatgcctctcctcctccttggctactaacccctgacttttccctcccccttctctggccactcctgttcctgaacaaagccagggaagatctgggctggctcagcccctgggtgtcagtcaagactcagagggagactttgctcaaaaagccagccctcccggaaagaaatacagagcaactgtagtcaggaatttttccctttccttttttctgtgggcggggggagggacacttggcagtctttggggcccttctggctgccagccccacatctcttcctggctgttgggaggcagggcaggagggaagattggggagaagggggcaggggctggcaaacacccagctgctgggcagtggaattcgtccataggccctggtggagttggcctctagtgaagcctggggaggtttctaattagtggaggacggtgaaggtgtggcagcctgtgttcattcaaggaactgagctctctgagccaggaagtcaaagggaagagggggactgagtcccggaaggccttggtaggtggggaggaagttgtacctactcagtgtgttccatcctattagaagttgagaagaggggggtgtttcagctggagtgattcaggttggactctgggggtgcagagagtcagtcattggcactaagcaaagggagccacctcaaagaataagtgatataacagtgataaacaaaatggctttgttctagacattgcctgcttctaccagaaagctcattttgttttttttgtttgttttatattcttcccctctcccacttcctgccccagctctgttttagcctcgagattctctccacttaacaaatgaagaaatcaaggctacattcaggttcaactgccaaggcaagcacagaccagattgtagtctgggtctctagattcttccagctctccatttcaccagactcacacatgcagaaaagcagtgaattatatactgcttcttggaagagctccttttccctgggaagtagtaattaaggcatatcttctcaaaaatgttcctttatgcaactctctaggaagtttcttttaggtctattgtctttacttctggatggaggtgccaagttgcctctgggtggtgaacttgttttctaaaatgcccgaggccaagaacaaaatgaaaatggcaattcccttgtgccctgtgccctgccccgtgacttcctgataatgctgagcagttgctatagcaacagtggtgggaggtgtgtcaggcaggataaagggggtgggggtaggacaggtttactggatcaaagaggcttttgcggttgagtagggctgctgacatgactgatagcctacttctagggaaagatgggggtcccatagagatggggaggggaagaaatgaagccctggggctaaaaggtcttgcttgagagtctttccttaggtgatgccaagtgaccaggtgccatctggttggttaacaacctgggcttggttttggccactggctacatgactttgtgcagttggcctccagctctatagttcatttatcaagtgtgagggggataagaaattaccaacctcatgtgcctgcttgataacaaaggtaaacatgcaagccacgtagcacagaaactcagataatcaaatgaggtagtgcaggttctgattcttgcaatacaggagaacaggagaatggcagacaccgcttttggacgttttctgattggtcatttcaagaatcctgttagcaggtgtgacttattcccttgagtgtggcttacctggacagctgccactttgctttggaaagcctccagtgagtccagagaggagtcaatggttgagagttttccagggggcagtcatgaccctcgatgccattgtgcctgtggttctaccaacagcttaatgaccaaccatgtcccatttatgccccagaagttaggactcccacttgaggctctgctggttgtctctggtttggttcactgcctcttaaaccttgagagcatagccaaggaaggtaattgatgtgatatactatcagacaaaattagtgaactttagttgaagacagagaaaagcatggtgacctatttaaagacacttatttatattcaagacacttcttgtgctggtttgagagtggccggcaatcctggacatctttgcaggttttaaatttctttttgcatcctgtgggttcaatttgtcaggcctggaatatctgagagcagagttatggggatggagaagaggacagtggaaggggagggtggtgggaaaggttggtaggattcagcctttgttacactatgggagtggggctgtgggattgcatcatcgaaactgaattgtttgaatgtgggtcttaggacaggcatgtgtccttcccatcccatctcatggttccacttgctcactgcctttcttgacttgctcactgcctttcttgactcttaaccactcttgctgatacgggctctagatgaggcaaaggccagaagaatgagaaaaagagttaatgtaacagggtactcttgggcaagtgctagatgctctttgatagtgtattagtctgttttcacgctgctgataaagacatacccaagactgggtaatttacaaaagaaagaggtttaatagactcacagttccatgtggctggggaggcctcacaatcatggtgggaggtgaaggcacgtctcacatggtggcagacaagagagcttgtgcagggaaactcccctttataaaaccatcagatctcatgagacttgttcactatcacgagaacagcatgggaaagacctaccccgatgattcaattacctcccactgggtccctcctacaacatgtaggaattgtgggagctacaattcatggtgagatttgggtggggacacagccaaaccatatcagatggtcaccttttctaatgtgtaaacattaattgagcacatgctgtgtgtcagctaggagaccatatgaaaaagcagttgtcataccacctgtaacacatgctttttcatgctggagggggacaagaaaagcattttagaaaggtgaataaagaagaaaccaaggcagcagagatgtatatacatcctatgcaaataaacaggtagctcttggtcactaaaagagcttaaccaagtctcttgggaagagcttgatgttaaataatgaagtcccttcatggtaaataaagttatgaaagtaagagaatcaagttggacaggcttctacttcttcagtcttggaagaaaaaaaaaagcagtgtcttccttcctaaaatgttaattgaggacacagaatgtcttctcacctgtccttcattcactaagtatggaaagctgtacggaagctaagaccaagtttatgtcttcaggaagcttctgtccttaggaggactaagaaaatgcacagacctacagctttttggcaatggactcaggctagagtgctgtgaagaaagttgggtcaaattaccagaagactttacccagcagtgcttttcttttttaaaattttgtaaaatttttatttatttatttattttatttattttgagacagagtccccctgttatgcccaggctggagtgcagtggcgtgatctcggcttaccgcaagctccgcctcccgggtttgcaccattctcctgcctcagcctcctgagtagctgggactacaggcgcccaccaccacgcctggctaattttttgtattttttagtagagacggggtttcaccatgttagccaggatggtctcgatttgctgacctcgtgatctgcccgccttggcctcccaaagtgctgggattacaggggtgagccactgcgcccggcccttatttatttgtttttttgagacaagctctggctctgtcacctaggctggaatgcaattgcacgatctcagctcactgcaacctccacctcccgggctcaagccatcctcccagctatggcagtgcttttcatcaatgcaatcaagtgacctttggacacttggaggccatattgttcatccttcttccttctcaaaaggtttctcctaagttataccagagggagtctgtgcaatttcttcccatctgcaatttatcagatttgttttgttctttcttatgaaattcttggatggcttctaacttggatctctcctgttttagtttaaggctgttttctctctggtccttggggagacagaacggctccttcccttcccttgggttttcctggcccttggacacctccaccactcagcaccctctggcagcaccaggatggatttgtcccttggctttcagttctcaggcctgagtcatcttgattacttcatcttccccttcttaattctgtgaccctcttctactacctttgggtcttctttctgactcatttccgagttcttcatggcatagagaacaggccaggagcccagggctaggttctgactggtggacaagtgaccctggtaacatcattgccctggccagtgagagtggtggtgaagtccgccatgtcactatcgtttggtcctcttccagtagggcttcagggacacttgaggttactgatagctctgcttgatgaggaagatgaggggtggttggtgtgagaggtgacttttttgtttttgtttttatttttgagacagagcctctcactctgtcacccaggctggagtcagtggcgcgatcttggctcactgcaaccttcgcctcccgggttcaagcgattcttctgcctcagcctcctgagtagctgggattacaggcatgcaccaccatgcctggctaatttttgtatttttactagagacggggtttcaccatattggccaggctggtctcgaactcctgacctcgtgatccacctgtcttggcctcccaaagtgctgggattacaggcatgagccaccgcgcccagccctgagaggtgacttttttaaaagaatatttaaaaaatgcagaaaagtacaaagaacaatgtaataacacaagtctaccacccagaaccgtgggcggttgatattttgtccactagcacgcagtacttacttagtgtttatctttcttagctaagcagacttgcatatatgtgatagatgactaatatgcctatgtttgcatatattgcatctatatgcatatatatgatagatgaccaatattgtccaaattgttttgtgaaaataaattgaaaatgcacataaaggttttattttccctcttaacattaggtgtctgagatctaatgttgacatccataggtcagaaatattctttttaactgctatatattgttcctttgtattaccctactggttttatttatccattcacctgttgaaacacttttggatctggttgctaatagtgtttttacaactacaagtaatgctgtaatgaccatttttgtacatgtgtccctgtgcacatgtagagagaagaattgctgggtcaggcacattcttcccattcccatagtccctggttcaagtttgaatcaaagcacagtctactcacttgggcctcagcaactaggtcaccttgccaggttcctggatggctttagttgaacccaaggagaaatgtttgggacccgtggaaaggagtgaaagctgatagtgctgtttgccatcttgatatcagtttctctggctcttcaaggacagcttggctcacggggccccagaggaccttggctgaatttgagcatgtttttgttttctcaaactgtctgcctcagccctgaccctccccaggtctttgcaattccaggaatgaccctgatgtttataaaggagccctttggagagtgcacaggcagggaggctctggagaggctgtgctgtttctgttcactcggggggagcccgagatgagatggcagcatgagggcatactctagaaacctccatgacgccaggccaggagaggcccctctgcatgtatccaagcaagcatatgtgtctgtttacaaacccatgagtggatgagcttacaaggctgtgtctctgcaaagcttatacccgagaccacctctcttgaaaagaagaggcattgttctcgcctcaccaggaagttcttcaggaaacagacagaacagagagaatcacaaaggcatgggggcctggcaatgccagagcttgagaggagaggtatcattcaacatacagattccttagtccttgcctctgactttctggggctggggtccagggctcttatttttagcaagctcatcagatgatttctgatgaagagctatgtttgggaacttctgactgggtctaattccctgaatttacagatgagtacactgacacctgcgcaagttgaacaccctgcttagcgtcactcagaatcccaggggtggtggtgaagtcaggatcgaacctcagtccttcctcccacactgggactgcttggccaaggcttcgaacccaaaagctggtgctccaaaggaaatccaaaaagagtttgcagagtggtttgacgtggaggggattcatcggccaggtgggggctctctgccctcccttggtggtgcatcatctcctgtaggtgttttgtcaccgtggaagggcagtagcctgtgcctgttgggcttgccactcaacagaggtcactgagctcttccgcactcagctgggtgattggcctgtggtagctgcaggtggagggagatgattctcagaagagaaaggccagttcttgcagtcgtgtgatcttataacctaggggacttgtggatctgaaacatctgagaaggctgtttgcagttatttactaccacaaaggaaactgggagaggagggaccacctgttggaaaaccatgctcagaagtgactggtctgttgctgaaggatggaaggatatcaggtgttgcatggctggctcccttgcaggaaggaagggctcagggggtgagaaggaataggaagggagtttacaatgaatgaagctgggtgtcctcaggagatagatggaccagttggggtgatgtcattaactaagctggaatgtgtcctgagtgccagcctataccgcgacagacatctgtgcacactattcagaattccagtgtgagaggccactgccccctctgaccttttgaaaaaaaaagtcaggggaagacacataaacagtgtcactcacccacaaagtctcaggacctcaggttaaactttagctaaagaagtaacaaatagaacccccattttaccttcctctttcctaacttctgcctccctccctcccaccagcatggcctgaattactaatcccagcctgttggtgggctgtgctattgaacatagtggccacatgctagatggagtttggtgaccaccatcagccatccaaagaggactggcttcaaattctctccaacaaaagctgtttcttgtatgtgctggcgtgtttatgagccctgtctcaactgagcatgcgtggtgattatgagctactgcctgacctccttccctttgtccctcccgctaaattctgtaaacaaagttaaagtaatttaggcaaattcattcttgcttaaggacttctattaaatggcagagagctttgatatttagcaatgtataaaatttgtacaatcaaaaccaagctttagaagaaatatgcaatagatcatattgcagaactctcatgactcattttttccatgcatttggccattctacaaatcagacattacctagccttcccctcacatggcagatataacttttatttacccattcaagaaattgattgttcacacattcctttttctttgaaacaaggtcttgctttgtcgcccaggctggagtgtagtggtgtaatcttggctcactgcaagaagtgaactccgcctgctgggttcaagcgattcttgtgcctcagcctctcaagtagctgggacctcaggcatgtgccaccatgcccagctaatttttgtatttttggtagagacaggtttttgctatgttggccaggctggtcttgaactcctggcctcaaatgacccgcccacctcagcctcccaaagtgctgggattacaggcatgagccaccatgcctggccaccacacatttttttctaaagcttggttttggccacagtgagagtttcttgggctgtcaggggtaaaaataccatgtcttgtttaacagcagccatcattttagcagaattttttttttttttttttttgagactgagctttgctcttgttgcccaggctggagcgcaatggcgcgatcttggctcactgcaacctccgcttcccgggttcaagtgattctcctgcctcagcctcctgagtagctgagattacaggcatgcgccaccatgcctggctaatttttatgtatttttagtagagacggtgttactccatgttggtcagactggtctcgaactcctgacctcaggtgatctgcccgcctcggcctcccaaaatgctgggattacaggcgtgagccaccgcgccccgccccttagcagaattgttaatatcatttttcagacttgagaaattagagctcagagaggttaaaggttctgactcgtgagtgaatctcaaagggcaaagctggcattcagggttcttgactgctgggttcattgctcattccagtttgttaatgaatcgtccactgctatggatattaatggagtcgtctagagagcagggggaggaggatggtggttagtatttattctgttgcccaacatatgtcaaggctaagtgccttttgggagaaattaacaaagacggagccatgtgagttttctgcccagctagggtggaaccaggaagctgcggccagccttcattcccctggcccattactcagaattaactcttgaaaggcttggaatgctattacctgttgcaagaggtgagttcattggaggaatgataagttcagggttggcttagatcatctctgtggtactcctctttcccaaccctgctcttagattttaagataatcatgagataggaggagaaggctggaaaatggtaagtctttcttcagaataaagaaaagaagaaagaagagagacacatgagctgttaggaagatgtgattgttctaggtagggaaaaggtcttatttcctcaccaggtctggataaggaccggggccacacactctgaggaggaaggaccagggaggtgcttttagattcttggggcttagtttcctaagaaagctttttaaggtctctcttagatcaggaatcaccaatttccaaatagagcactgaggtcagaacattgtgctaggagaaaatgagattttgtgggagtccgtttctatcaaacacaagagtttgatttgttgagtaagatcattgatgcaacaaacaggattacattggaaaaatgagctgtgccaaaattaggtctgaaaacctgggtatgaatgcatagaagtgaacaataaaggctctttctcttgggctgtcagcttccagctgctctccttggctaaattagtaagggtgggccaaaagacaatgtagggaccccatgataattgtgaagaatggcagagaggttgtttgctcctgtgaattcaaatggtagtccatctgggctcaggtttgccatctgtaaaatgggacaacgatccatttcttttcatcccatctgccttcctcatctccagctctcctctaggggtcttaggtagaaaggtgtggcagtctacccaaggcaggggtgggagttctcccctgcccttcaagcccccgactaatggctctggggttgtctgtcatctccctgacttctctttggaaaagcttgaccttctatatgtgaaatcccttgcttctgtgttgacccatttccctaggtgctatgtagggaagaagagctaatgcttactaatctacagggaaagtctcttcaggggccttggaggtttctatcaaccatttctaagcccatgagccttttccattgatgtcatttggggttgctaagaaccatttcttatagtgacctttgcaccatagcccatggagttgcatacataagtggttgcttaataaatattattctgaacttaactctcttaggcagaaaaaaaatacaacttggtatttttgttctgagggcaaattccatctctagctggagttcgacatctggaatgttttcctgtggattgttcttgcagcctataagaggatatatgggaagaacttggtaacatgtgataatgcccttgtctgactgaggggaggaggggcgctatgtgggtacttcctggtaggcaggaaatggaagtggctaagagctaaccccatgtgtgcctactgtgtgccaggccctctctgtagatgcaggcagcatctctttggatcctcccagttgcccataggaggtgcatactgtttgtccttttacagatgaacaatggaagcacagagagcttaagaaagttgtctggtgctgcacagctcagtagtaaaagcttgaattccaactcaggcagttagattttggggtttgaatctctttggctgggaacagtaacaaggaatgcaggcttttctcagcctacaatgctttctgatctctgcctggtcaactctttcatttcccttccctgggcttctacttcaagatgtggagttcagatctggctacgggatttgagtccagaagcctcttcctgagaaagaaacagatgctgatgcatggtcttgttaaaccatctttaaaagaccttgcatcagcaaaccaggcctgtggatttcttcatcttattggcatgttcgttggcactgctgagatcaataaagaaatggaatgaaacatacccttgaatccaggtggcctctgtgagggtggacaaacttgaccttcacctcagagagtttgggacatctcagggcaggaaatcaactttgtcctcctggaggaacactgccaagttgaccccagcctcctgggacctggagccagggttgcatatgacatctgtgggccctggacactgcctctgtgggcccttctataaaaacatatatttttaaaatttaaaaattattatttttcgtttttgagacaggggctcactctgtcacccaggctggagtgcagtggcatgatcatggctcactgcagcctctaacccctgggctcaagtaatttcccacctcagcctcccaggtagctgggaccacaggtgtgcatcaccatgcctggctatttttttatttttagcagagacaaggtgatatagttaggctttgtgtcgccacccaaatgtcatcttgaattgtaatccccataatccccaggtgttgatggagagatcaggtggaggtaactgaatcatgggggtgggtcccccatgttgttctcgtgatagcgagtgagttctcctgagatctgatggttttataaggagctcttccccgcttcacctggcacttcttcctgccaccttgtgaagaaggtgccttgcttcccggacctttggcttctaccacgattgtgagtttcctgaggcctccccgccatgctgaactgtgagtcaattaaagctctttcctttataaattacccagtctcaggcagttttttatagcagtgtgaaaatggactaatacagtcaggcgtggtggctcatgcctataatcccagcactttgggagaccgaggtgggcctcctgtggcaaggagttcaagaccagcctggccaacatggtgaaatcctgtctgtactaaaaatacaaatattaaccaggcgtggtgacacatgcctgtagttccagctactcgagaagctgaggcaggagaattgctcaaacccaggaggcggaggttgcagtgagccaagatcgtgccactgtactccagcctgggtgacagagcgatactctgtctcaaaaaaacaaaaaaaaaaaatcaaaaaaccatattttataacttgtttaataaatgcaaatgtattaatattatatagtaagactttttaacctaaaagttattttttttttctgatgttaatagaaataaaaatatgtcctaggcactgtgcctccagagcccaatggacaagttggccctgcctggcgccttcaggcccgaatgcacatttatctgtgtgtgcccctctcctttttcaaatgtgtttccagagattgcagagggccttcttctgaggattaatgttggattgacctctgggacgcagccaagggatggttctttggccactgtctgtggtacaagagggcttcgtgaagatggggagctgcaggctgaaagtcctctaggaagcccagggaagatcctgtgccctgcccccaagaaactgtggactattgtggctgcagatggaagggtagcggaggggtcttagccgtggatgcggaatatagtggagctagatttgctttatatggggcctggagccatttcagcaatgggctatcagcttacaggtcttgggctaaaagcctgactccagaagagtgattctcaccctgggcagttttgcctctccggggccatttggcaacgaatgaagacacattttttgttgttccaacctggggagggtgctactggtttctggtgggtagaggccaggaatgctgcccaacatctggagtacactggatgttccaggcattgagttcgggtgagcggctccttcccagaagctcatggatagaggtacacatgagctgcctttcccgtctccaaccagacaacgtgttgttatagccataatagagactgtctgccttcacccaagccacttcccaagagggcagagccaggtgagcctctgagcatcacagacttcatgtccacagattggagagttccagaaatggtggcagggtgcagtaccagcagactcccagagctcctgtcttctctaacaccctgtgagcagaatgcggtgtcgaggtctccagaaacccttcctgcctctgtgggcacaaagctgggtagggtgcggtaagcagggtgatgccaagggtgatctcaggtaccaagggttcgggtgagggcgaactggaggttcccacttcattttgtctttctcattttgatcctgagtagctgggagggagtcaaagggctcttctctatgttccaatgcaggtggtgggagtggggagactttctagctactttgctctcctcctgtgtttttggtgtctgcagagggcaggggcagggagcttgagatggtcccactcaggtctggggacagagaggcctgtctgggaagggcagcggggcggaggcagggaggctggggatgagtgcgtgcgctgcacggcatctgtgtgctgcgttagaggtcagtgttgagatggaaagttgactgaacctgatctcttctgtttgttgtccaggtttgtctgatctcagactttccccggcctttctctttcacccttttgtttctgacctctggggtccatctgaagagggaaggggggctcttctaggagggtgtggacctggtggcgctgaagaaatctgccgcacggtggggtgactcagcgtccctgttcttgggaacctggcaggcagctgagcaggggcactcactcagcctgcctctctgggtccctgggtgtctgctgctctccatgtggaggagcacagagggcagggcaggatggatgaggaaagctgtgggctggtgcctgggtctgattagacatggtggagcaggactccaacctagcctggaggcgcacgctaaatcggccttttcctgccggtggtgctgggctgccgggctgctggaacaatttaatctgtgctggcttcatttatggtacaacccaggctccccagagcccctgtgggaataaccattctaaataaaatatttttccaggtttcaggtttatacatttaacatttaaattttttttttcctggagttcaacaattttggataaaagtcttttaaaatgatgaataggtagaattttaattccctcccctttttgatgtcccaagatcatcgtcatcaacgtaattcttgttttgggctgtaagacatggaaatccccagggttcattgaggggcattcattgtttgccacacacaaaatgtacccggagtttgtatgttttgttttcttagtgtcctctttcctctctgccatttgatccttcttgctactgtccacatgcattccttctttgtcccttcaattttgttgactttcttctgcggtggccttggaaaccagacatccagaagccaggcttcctggagcagcactgttgtgaactgtctcgaggctcctcacgagatgattctcccctcatcttgagtggaaagtgccaacatttgaacatgctcagccgtggtaacagctattaggatgttcagagcttattttccttggtttccctgttctcggttgggttccatgctgctgaagtagtagataactggggcattcgtcattgtcatcatcatcagtgtaataaccagcagcaacatggatatagaatttctgtgctccaggtcgtcttttatttatttatttatttatttatttatttatttatttttgaggcagtgtcttgctctgtcgcccaggctggagtacaatggtgcgatctcagctcactgcaacctccacctcctgggttcaagcaattgtcctgtgtcacccttctgagtagctgggattacaggtgtgtgccaccacacccggctaatttttttgtatttttagcagagatggggtttcaccatgttggccaggctggtcttgaattcctgacctcaagtgatccacatgcctcagcctcccaaagtgctgggattataggcatgagccaccacacccggcctaagtcatcttttaactgcttttctttcgtcatactctcaacagctctatgaagaaagaactgttattatccagcaacttacagttaagaaagtagaggcacagagagggtctgtgtggggagaacacgtgcagctgatatagaaaatggcagagctggactttaacccggctacacccctttaaccagagctgctaccctggggacggcgtgctggcttctaaaggaagctgctgcatggcaagtgaagagtgactagttctcaggcttggagggaggggaaaggacagggacagacccccatcaaatgttccgtatgctggggcctatgctgggcacgccttgacagcaggtgctgctggagtgccagcacccggtgctgtccctggcatggaagaggtgccccctcccttagttggtgagtgagtgaatactcttgtatagagttactctaagaattattcatttgtgttctaagggctgtaagtttttgaaggtgcattaatggggaagaaaaaatgtgcaagattggttgaaaaacacccctctgcacccacccagatcttgttgggacctgcaggagagcagctctgggtgggagggtctggggctgtttgccgtgtctccaaggggttggggctggggctcggcggtgtgaggccctgcccttctggagcttgctggggcttgtctcctggttacagctctgccgtgcgattcagatcctctctgcctcctttggctggacgtgcctcagccagagtgagactgtggcaggctggagctgttttcaaggcctccttcacctaggctgtgcatacaaaaggttgaagaaagtataaggagacttaatggacgcttgttggacagacatcacgaagcttcatgccctgcagtaagctgaagctatgaagtcgaaggagtcatagttcctgttcttggggctctcagtataatggggttggggtgggctgcacagacagacttgggaacgagggaatgtcagtgtggcagagctgtagctgcctcggagcagcactatgggaccttaggcagggccaggtgggcaggtacacagtgacagcagggggatgctgggaccaggttctgggtggcgacgtggccttccaccttctcactcctttgccatatatgctgcagcccggtgatgtctgtggcacgagttttaaaaaactcaactaattggtgctcttccagaccacaaatgaagaactttaaactgggggttatagtgggagaatttgggggggtcccagaaaggacttaaacccattccatggtcagggcctttcaaatgcattcatccctctgtgtgcctctgttctgccccagccttgtaagagggtccctgtcattcttctagagccagacagcctgatttcaaatcctgaatccatcgcttttcagatttgtgatcttggtcaagtaactgacctctgtgagcctcaaattctccatctctgaaagttggggagggtgctagtagtacccacctaagagttagggtgaagctgaaattgatcatccatataaattgctcagcacgggccctgacaggccatcagcactcattagccgcgcgtcatctccaccctcatcatcattacggtccaggtggctcccggagggcacgtctctctgggaaactggacctggagcttttcttcccttcctctcttggcagacaatggcgatgaccactcagaaggaggcctggtggagaaccacgtggacagcaccatgaacatgttgggcgggggaggcagtgctggccggaagcccctcaagtcgggtatgaaggagctggccgtgttccgggagaaggtcactgagcagcaccggcagatgggcaagggtggcaagcatcaccttggcctggaggagcccaagaagctgcgaccaccccctgccagggtcagtgagggtcaggtctggtggaaggggtgggaggacaaggaaagtggggtctcagctggaggagggcatcctaataagaccctcatctggtgtgacctgtaggcaaagcacttttctttccacaaacatagttgtggaacatagttagtgacctttggggcagtcagtatctctggctgtgaaatagactggacatgtggtttcttgatgttctttccttctaaaaccttcacatttctgtatggttttggaacatagacacagaaaatgaatcccagagatgaagacagagtccctgaaacttgcttactcttttttttttcctccccctgagatggggtctcactctgttgcccaggctggagtgtaatggtgccatcacacctcactgctgcctccaactcctgggctcaagtgatcctccttcctcagcctcctgaacagctgggactataggcatgcaccaccacacctggccagttttgtattttttggtggaaatgtgggtctcactatgttgtccaggctggtctcaaactcctggactcaagcaatcctcccacctcggcctcccgaagcgctgggattacaggcgccagccactgcgcctggcctgaaactcagtcttgttgccatatgcttctctcactgagctacccctcccctctttcctgcccagctctgccatcttgggtcctggccctggttggttttatggaaagaagtggagcttgggcatggggtgggggcatggagactcgagacggccacttagatggatatttggaggcagagcccattctgacacatgaaagccacggtcacagaacaaggagaggagtgaacattcccatccatacaattttctttaggggctggggttgggcacccagcatggcagggagatccccgggcaggctgtcagaagtccctgtgccccctgctggctgtgtgaccatgggaaagtcccctccctgtgcagcagcttctcgctgagcttgcgtctggcgcgtgcttcgtgggcctgctgtcctcactccgggcgtcccctgctgtctgtgcgtgcagactccctgccaacaggaactggaccaggtcctggagcggatctccaccatgcgccttccggatgagcggggccctctggagcacctctactccctgcacatccccaactgtgacaagcatggcctgtacaacctcaaacaggtgagcatggtgccagcctgggccagagcagctcctcctcagccctgggccccagatgtgccttgtttctgccccacccgcctatgatcctctgaggtctgagctgagtgagagactcagactcctgtcaccatggggattgggatgccagctgccaggccggggagggtgcagctcttctccctgcctccgacgggtcagttgctggctccacttgcccagctgcccaccggcctcacttggagtccaggttgggaggaggctcttggagaagggaagtggcttaaaccaagcatctttgctttgatcggacattgacatcacctggagctcttcctgggcccgcccccaaattgccatgtggtaggtcaggtttacagctctaacaagcctcaggtgaggctcataatctgtgagccacactcccaccatcattgatttcaaccactggccgagttgtcttcatggtttcgaagtatctcagggaatgaagagtcaggcatggagaaatgccgttggaaagattctgaaaagccatctagaacaccattgtaaatacattggagaaaatgaagtttaagtaaaccactcaggagcccttctccctcctctatccaccttctgttcatatgcattttaacagtcactgtgcatatgcaatattttccctgtaacatactttttttttttttttttttgagacggagtctcgctcttgtctcccaggctggagtgcagtggcgtgatctcagctcactgcaacctccgcctgccgtgttcaagcaattctcctgcctcagcctcctgagtagctgggattacaggtgcctgccaccatgcctggctaatttttgtatttttagtagagatggggtttaccatgttggccaggctggtcttgaactcctaacctcagatgatccccccacctcgacctcccaaagtgctgggattacaggcatgagccaccacacctggctgggcattgggatttttataaagctaccctggtggttctaatggcagtctgggctgacctaaagtgtggatgtgtgaagccaggagatgggaacagggctctgctgatggcttaggggtctcacctctccacccccttcacccaggcaccttgaccctctaaatattagtttagtattaaaagctatttgtgtacatgccctctaaatgtaagctggctaactccatttggagctcagaagaaaaagtctcgatcacttctcatgggaaacaggctgtctgctgcacctttgggtaactaaagtgatttgcaggagtagttagcttatgcataaaacagagaccttggagtgggaatgcctggcttccatctcagctgtgcttcttaccagctgtgtgaccttgggcaagttgcttagcccatctgtgcttcagttttatcatctgtaaaccagggataataatggcatctaattcacaaagtggttgtgaggattaaatgactatatttgttagaaactgaactagcagtgtgtcttgcacacacagtgcctggcacacactgattttgattgcaacatgaggttttacacctgacgctatgactaagcttcagtatgctgggtcccccccactggatgggacctctttgaggctggggactgagtcttttcatcttcgggtgtcctgaatggccttgctaatcagaggggtccctgggcgggcagcatcagcatcacgttggagctcgctagcgatgcagaatttccagctctccagggacctactgcatgggaatctgcattttatcaaggtttcctggcgcatatttgaagttgcgaagctccacccggcagcgcatgggtagctgcaaggggtggctgctcagtggacgccgggttgagggacagaaggaaagttgctggctgcgggctcctccatgctcttctcctctctccccagtgcaagatgtctctgaacgggcagcgtggggagtgctggtgtgtgaaccccaacaccgggaagctgatccagggagcccccaccatccggggggaccccgagtgtcatctcttctacaatgagcagcaggaggctcgcggggtgcacacccagcggatgcagtagaccgcagccagccggtgcctggcgcccctgccccccgcccctctccaaacaccggcagaaaacggagagtgcttgggtggtgggtgctggaggattttccagttctgacacacgtatttatatttggaaagagaccagcaccgagctcggcacctccccggcctctctcttcccagctgcagatgccacacctgctccttcttgctttccccgggggaggaagggggttgtggtcggggagctggggtacaggtttggggagggggaagagaaatttttatttttgaacccctgtgtcccttttgcataagattaaaggaaggaaaagtaaagtgtgtgtcttttgcctgagtctttggggtcttccagggagagatgcagagcctggcctaggttggcctacccgccatcatccagctttgcccctggctcctaggaaaatgggaaaggccgtttccgtttcccattcatgaaatggcaataagaaggaatgggaacctcctgaatccagatcaaaccctccagtgcagccccaggactcccaggtgaggcttctgcccccatgtggcccctgcctggcgctgtacaggggcaggatgagtcacgggctggggatggggagatgtggagcgtgggtccggcttcctccctcgcacattcagataacactgcagtgggagataaggaacaggaaacgttgggattggggttgtctggcccctgaaataaaggaggctccctcctgcccagggtgagacatttccactcagcccccaaagaaagggagtagggctgtggttaactggcttattcataaggatgacaccactgagaattcagatgctgctctctaaggggcccaagggatttggtgtccagaccagcaaatatcaattgaaacaaagggctatgagtgtgtcaaggtgtgcagg

SEQ ID NO: 3 - DNA, 48044 bp, Homo sapiens
tgattgtcaatggcctttttgagttccacatcagggcatggacatggacaaattaaattagtatacttggtgtcatggttaattttcccagccctcagacttaaagtgagtgctctagttttggtttttgtaagaccagggaatgaagttcttttccttttttttttccccatggcgatttagatcaaaacaaagaaaactgggtccctatgtctttttgagtgtggttgatattcaaattgaaagtcgactcttagtttagtccctcaaattgctttcacaactggctctggttttaaatcacctgaaacttaaaaaacaatctccagccgcttttacatgaatacccatttcacaagaaaaagtcacatctctgtaaattccttgacctgtacacaccctgtcagggccttgaaaagcctgtaaatgccattgtagtatcactattatttttctctgagaaattacagagtacaaaagccccaaggtttgaagccagggaaatgtatttgtaattttcatgacatcagtttatgtaatagttccaagaatctccacaagtcccaatcaagataaatatgaagagatccatatctcagcacaccacagacaaactgcccaaaccagagatggaaaagaaatccataggaataaagatacattgtattcagaggaaaatgacaagagagtcaacttttatcagaaacattgcaatccagaaaataaaagaaaaaaacttataataactgccaacaagaaaaagtcaacctagaattttcttgaatagaaaatattcttctaaaaattagatgaaacaaaaataagtaaaagctgagaaaatgtgtcactagaaactctctttgtaagaaatgcaaaaggaaattcttcaagctgagcaaaatgataccaagaaatctggatctactagaaggaatggaaagcacacaaatggtaagtggcgtttataaatattacttatcccttttcttaaatagtttaactgacaattaacttaaacattatcaatcacaatattttgagttcacagttgcaaaaagaagttgcaaccactagaggtcagacatttaaatctgcaatgtgatacttcatattactaaatgctaaaatcatccagtttttctaaattattttctaatattttctaaattttctttattactaaaagtcctttcttctctaagagctcaaagaatgtcctgccttggtagatagatattttaccctgtatttaattgaacacaaaatcccaaagggaaatgtaatccaggaatacagaaagatggaacaccatcagcagggtgattttctgatgattttctaaaaataaaatataaataaggtaaccatttgatgtatagcagttggcatatttcacagtactttcacatacatgatctagtttaaccacaggttagagaactctgtaagcatttctaggtctaccaggagtcttggggtttgaacaccatttcccaatggacacaattttttttatttttcttattacactttaagttctgggacacacgcgcagaacatgcaggtttgttacataggtatacatgtgctgtggtggtttgctgcacccatcaacccatcatctacattaggtatttctcctaatattatccctccccttgcccctcaacccccgacagggcccagtgtgtgatgttcccctccctgtgcccatatgttcttattgttcaacttccacttatgaatgagaacatgcggtgtttggttttctgctcctgtgtaagtttgctgagaatgatggcgtccagcttcatccatgtccctgcaaaagacacgaactttttctttttatggctgcatagtattccatggtgcatatgtgccacatttcctttattcagtctaatattgatgggcatttgggttggttccaagtctttgctattgtgaatagtgctgcaataaacatatgtgtgcatgtgtctttatagtagaatgatttataatcctttgagtatatacccagtaatgggatggctgggtcaaatgctatttctagttctagatctttgaggaatttccacactgtcttccacaatggttgaactaatttacactcccaccaaaagtgtaaaagcgttcctatgtctccacatcctctccagcacctgttgtttcctgactttttaacaatcgccattctaactggcctgagatggtatctcattgtggttttgatttgcgtttctctaatgagcagtgatgatgggctttttttcatatgtttgttggccgcataaatgtcttcttttgaaaagtgtctgttcatatccttcacccactttttgatggggttgtttgtttttttcttgttaatttgtttaagttccttgtaggttctaaatattagccctttgtcagatggatagatggcaaaacttttttcccattctgtaggttgcctgttcactctgatgatagtttcttttgctgtgcagaagctctttagtttaattagatcccatttgtcaattttggcttttgttgccattgcttttggtgctttagtcatgaggtctttgcccatatctatgtcctgaatggtattgcctaggttttcttccatggtttttatgactttaggtcttacatttaagtctttaatccatcttgagttaatttttgtataaggtgtaaggaaggttccagtttctgttttctgcatatggctagccagtttttcccaacaccatttattaaatagggaatcctttccccattgcttgtttttgtcaggtttgtcaaagatcaggtggatgtaaatgtgtgctgttatttctgaggtctctgttctgttccattggtctatatgtctgttttggtacaattgctatgctgttttggttactgtagccttgtagtatagtttgaagtcaggtagcgtgatgcttccagctttgttcttttttgcttaggattgtcttggctatacaggctcttttttggttccatatgaaatttaaggtagtttctttctaattctgtgaagaaagtcaatggtagcttgatggagatagcattgaatctagaaattactttgggcggtatggccatattcacaatattgattcttcctatccatgagcatggaatgtttttcaatttgtttgtgtcctctcttatttccttgagcagtgtttcgtagttctccttgaagaggtccttcacattccttgtaagttgtattcctgggtattttattctgtttgtagcaattgtgaatgggagtttgttcatgatttggctctctgtttgtctattattggtgtatagaaatgcttgtgattttttcacattgattttgtatcctgagactttgctgaagttgcttatcagcttgaggagtttttgggctgagacgatggggttttctaaatatacagtcatgtcacctgcaaatagagataatttgacttcctctcttcctatttgaatacctttatttctttctcttgcctcattgtcctggccacaacttccaatactatgttgaataggagtgaagagagagggtatccttgtcttgtgcctgttttcaaagggaatgcttccaacttttgcccattcaatatgatattggctgtgggtttgtcataaacagctctcattattttgagatatgtcccatcaatacctagtttattgagtgtttttagaatgaagaggtgttgaattttatcgaaggcctcttctgcatctattgagataatcatgtggtttttgtcattggttctgtttatgtgatggattacatttattgatttgcatattttgaaccagccttacacccaaggggtgaagccaacttggtcataatggataagctttttaatgtgctgctggattcggtttgccggtattttattgaggattttcacatcgatcatcagggatactcctgaaattttctttttttgttgcgtttctgccaagttttggtatcaggatgatgctggtctcataaaatggttagggaggaggccctctttttctattgcttggaatagtttcagaaggaatggtaccagctcttctttgtacctctggtagaattaggctgtgaatccgcctggtcctgggctttatttgattgttaggctattaattactgcctcaatttcagaacttatgattggtctattcagggattcgacttcttcctggtttagtcttgggagggtgtatgggacacaaatattttgagtctcctgtcatcaagtgagagtctatatgctctcttcacctttttgcgttcatttttggtggcttcaaccattagcatatgtggcagaagatgatggccgtgggtactctgacatcagctcataaaagaccatgcatattctgctttgtttgctggatcactgagctgtcatatgtctaactcctctgaggccactgtgttgaagaagccacatgtaggtgctctggctgagaatcccagtagagctcagcctttcaaacatccttgtcaatctggggacacgtgactgaataagccatcttggcagtggatcttgcactgcaaggggtcctaattgaccactggcagttattgaaatcaccccagctattccagtcttcccagcttaagccacagacatcgtggaatggtatggctaacttgcaagttattcccattcggcactatctgaatctttgatcaactgatacttgaagcgtatcaagttggttgctactttatggcactaagtttggagtgatgtatcaggtagcaatagataactggaacatccagggaaattaactgagtttccctaccttcctttctgctttgtcaaagctgacatgtgtaaaatgtgggtcaacttgggcaaatgatttattcatctcaattatcccctgtgtaataatcttgtaagggtagaggaaaaaaaaactataaaagattatctgccacatggtgaaaacacatcttgatagatgtttaaatgcaactgaaaaattgacaaatctgtttctaaattgaggttccccaaataatctatcttgctgaagaattattaattcaccacctctatggttttatactgtttggatatgaagtcagtttctcattttagcggaactatcaactcacatccaagcaaatgatttccttcgcacactgtactttgtatatgaatttcaaacagtgctagtatgcatttaagccattataatgaatatgctgctcttgtttttattcacctaacgcctgcatacttgtgtttgttttacttaaagtgaaaataatttgctaaaggtaaaaatgcacttctgggtgcatgtgttcctatgaaacctaaaagcagactggaaaaatcaaagattctttttccatttaaagcccaaagcttccatcattaccacagacctttttttctgaaaaagaaacaaagaattagtttctgtgtccaatgaaatagtttcttttccacccgccaccccaacctctaccctttaactttctctaatgatatcactctttttgttgttcattatgtactgagaagctatgacatccaaacccctgttcaggtcccacatggcctgaaatcctgtaactcatataattccactttaacttatctaattccactttctctacaagtatgtgtccttgggaacaataataaagatataaagagtgttgcacatttgttagcataaaaagaagagcaggtcttttccatttttccccacagcactaacagagtatcccaagattgttttgcatataggacaacagaagtgaataaaaaccttcatcagatgcatgcctcttagagaggaaagcagaaaccctcatgatatatggagagaacaagaagaagaaatatggggataacaagaagaagaaattttgtaactattcgatttctgcaattggaaattcatcacataatatcattatctggtgaagtgaagcaacaaaagttattttagatcaaaatatattcaatgtgtctgagaatagctggaagattatgattgaaaaatgaggaataactcaactttggttggcacttttcctaggaagaaatctgaaaagcttttcagacgtagagaggaagcatatatagaccctgtactaaaaacactggaaatagacaaagggattttgaggacagtgtcggacatagacaaatcagcagagaggatatatcagtggagaaatgcaggtctaagcatgggacctgagagtatttctatttcagagggaaaggatccaaggaaagtgataaatggttgattacaaattatggagttaccataatttagtccattctttcagcagaccaaatgctccagatgggatgttgaaattttagcactatgaaagatagatggctacagagttcttttaattgcagcaattatccatcccttcatcttacagtctaatctggaagaatattaaaagttatttgtgggcaggagacagatgatgagtagggtcttaattacatctcaaacaaaatcatccagaaccaaatgagagagaagatgcaagccatgtcaacagtatcagggggtcagaagtaaggggtgtataaatgtgagaaggaaccaaagaatgaaatcagactgcagaagtgattatttccaatcatttgtttgaagtagaaaaattcagtcataatttctaaccacatgtcactcttttatgtcagtgtagaaaaaaaccacagaaacccagattaaaaaaaaatgaagctatttatgtctcggccacatacacaaaaaaacgggactagatttttcaacttttatccagatttggcatcgcttattgtggccaatatgtattggctgtagaatattttatgtaagagtgcatcatgaatcttcagttgactggcattttgaaacacaggtaaaatgcctaagatttttatgtaagttttatattgattattaatttaatcaaaatatggtatctgtgcttctagaaacattgtatactatactttctccactagatgtctccagagaaatgcaagtaaatactgctaataaagatactgttaataagcacccagttttaaaattgcaaaagtacccagttcaattaggattaaatagttacaaggattgactatttaatatgagagtggacctgacacttgataggcttttaaatgatgtgagagcttaaagttataccggaaagatggcatactactcgcatttatttcagaaagccttttgtcttgctgctaaatgagttaacattaaagaaacatcacctcatgtctactttgcactgcagttaatcatctctttctctgaatatgatttcattattttagaaatgttggccagaagatgaagatttatggaatatacagaggaaatccgttgaagtattatgtcaaaaggatggcgtgagagtgcctacagttcttgtagactatacaatgtgtccagccacaaatatctgagcctatatatttcttctttggcctcttcaagttgttcattgatgttcaattttatttgggctgtatgcatagtttaaaaagggaaaaaaaccatgaaatctaacttttgtttaatttgaattcctgctcctgtaggcttagttcagcctaacctagtcattttaagaaaacattttccctagctcaaaagaaacaaagatcactgggtctttgccagaacttcaatttatagagctgttaacctagctgtccaggaagcctgggaacctcactagacaagatagttggacatggaagtgctacccccaggaaagtggggcactaacttcaagaccttattatgttttacaagtaagttgcaaactacatgtagattgcaaataggccagaaagaaagcaaagtgatgctcaagaaatgttttcacgatcctgtaacctatatgttaaaaagcaggggcttagaaataatttggcacaaatagctactctggatcatgcaaaaccaaggaaatttttacttttaaaaaatctgcacttggcttgagtatccaggtttgttgaatccacagtctatgtccaatcttagacagtatagggcaagtttaaggttagttacatgctggcggcagtaagcatgatattacaatgagttcatagtctccagaggctacaagtcttgttacaaagatccactagataatttgcaaactgacaatacattagcatcccgacagctagaaacaaatgatcctctctttcagtcacattatttttcttcagttacatagtaaaccatttagttttcatgaatgacttatatttctgggtcacattttgcaaccctgaaagtcagacttaattatcatcatttcaattttcctcccatctcccaggaaaattacatggacaaccccagggtcactgtctttttctgatgcagaagaataagggtcctgtgtgaagagagacggtggggggcagggaagagagagagaaaatttgacccttgatgagtgctcagaaagggaagaattatgttccttgcaagattctcaatatcttctctaaaacttggactactctttcttccattatctttcttacaactgtttccttcccttatcctaccgaaaacttgctgagacttcctcccactattaggcatataatatcacacttctggcctggccttagctttttaagttccagtgctataatctttttatgtttaccctaattttttccttctcttgggatattccccaacatctaaatttgcaggtagtttgtatgcacacctggcttgcattgtcaagatctttcgtgatgtcattactaatcctaactttaaatactgagggctgctatttgttgattttcatgggacttacacaagttccagaaataatgctcaggatggatagacttatggtctctattatttgaagtgtgaaaagaaagatttaagacctctcttttaattgtatgagcatatatcatgctttccacaaaaaagcataaattaatctcacctgtcagaagggagaagtaatcttttgaaatatgactgcatttccatcttcactactcatttcatgtaattatttgtcaatttagacaactgcaagagccacgatgaatggaagccattaatactagtgcataaaactggttgcaaagaacgactaggttaaaattgttcttgaaaataatcaataaaattttaattcgttccaggcaatattaagaaagcaggcaacatggcaggaaattttgattcttccttcactccttgtattcacaatcaggtctatcagttatcattccggactgtatttaaaaatatatatttttttacccttgatacttattacacaagtctatatctctttctctgagtacctcatccttcacctccagtcaaaccctattggatttgagcagatatcagcttcattacaaaaaggtctgtaagtagttacatcagtctaaagatgaaaagtgtggcattagtagcagtgtaatctatattataatgtctaactggtctagagttgaagacttttatatatccatttaaccaggaatgtcctaacagctaatttaataatattgatagtttatccgtcctaatcaataagcagttactgaccacctgccatttgcacaacataagagtaatagaaagctataatataaagcaaaagatgacttcataaagtcagaatgattccattcagagaaatgtaaatgatagactaaactcttccttccacaaaggaccagggtcagaatataatttaacttttatgctatctcctctccagctcttcttttgaattgccccttcattttctataacttaatcccaagattttcatattgaaatggcctctcgatcatatttcagcatttgtggtttcactgtgtgctttcttaataaactaagcagcaagttgtagaatattttaatatcccatagtgagtttaagcataactcaggatactcagaatcctctctagttcagtccagttcccctaaagccttcccaatagaacaacaaggagaattctgacaaaatctctctacctcaccagtgggaaaagaacatggatatgacattacagagggagcatcttgtagcaaaatggattggaattacactttaggatggtgtgcagcttgtttattcaaggaagctgattgtggttaccatttcagctcattgtttccctctgatattcagatttcttttatccaaagttttctgaacatttgacatatgcatggagtagtaagaacgcacattcctttggctagggattgcatagtgtaacattgaaaggctttagttattcttgataaaatcagaagaatcattttggcaatgtccatgtttcctaatatgtatttaattgttctagttatctctagattcgtaacacttgcttccaatattggctgcttttcaccagtggttatcagtagatgtgctgcatagacatgttcaacatcacataaagtgtgtcatgaaaaacaataaagcacaaatgtttttcctttctgcttcatttcaaaccttagagaaatttgtcagagtagatttatgttaactctatatgttccttgatatttgaaaaagaaaggaaatgagaggtagctctcctttttgtacgatagcaaggaaaatatggactctcctacatggttcttcagcaagttagaattcttatttcatatcttacacaagttttaaatctatccagagtttgtttttaatcaacagcctttacccccttgtgattgtcagactcgcatctacctttgttttctggtaaaaataataataataataatctttcagttctgatgtgaactgcaataacacctaacaataatcttgagcacacagacattatacattctactctggaaaggattgcagaatatctcttaaaactcaacaaaagaatttttcttaaaaaccctctaagatacaaaggaataaaactgagacttaaacatgcagtgagtcaattgttcatatgattaaaaataagtaccttctttataatgaaaaggaaaagtagctcaatgtgttccttaaatataactaaccaaaacaaatcttagctggcaatttgaagttgccgatgcttcctggaaagagttcagactctcaggttgatgcagtgttccctcccacaactctgacatgtatataaattctgagctctccaaagcccactgccagttctcttcggggactaactgcaacggagagactcaagatgattccctttttacccatgttttctctactattgctgcttattgttaaccctataaacgccaacaatcattatgacaagatcttggctcatagtcgtatcaggggtcgggaccaagggtaagtgagtggtttggttttataaaccatttttctttttcctcagcttgttagatgttcaagtatgcataaagtttctcatatatgcctcagggttttttttcctaattattataaagtaataggaaaaaaaggaaaatgtgagtattctgtgatttatctatgcacttttaagctttaagacttaattgctctctaaataccttgaatataattgctttcttatgaaatgttatataattctaatctaattaacacaatttagctgggcattcttttataattccatttatttatgtttttattttcttccaaaaatctgaaattgagttttcaaaattaaaaaatctattgttaggaactatcatatgtatgcaaacagcattgaaatatctcacatgatgttagagaaaattttatttaaattacatatgaaggttaaatactgggtaatgtaactagttctctgaattctttgaagcatttaagttacttttaaactctgaattctgtaaaatttgcaaaggtaatttatattttatagaactaatgcaactacaactaagcatttttaaaattacacataattttgtaacttatccaaccatttataattttttaagcggatcttggcacttcttcctatgcctcacaggaattttcataatgttcacaagcttctttgacttacagtgaaaaaagacttctgtccctttaagaggggaaggggaaccttaaaattgtgacagaggatgttctgatctgttacttccattcaaaaagataaattctcctttgtgcaaccatattgtttcaaagttaattttagcacatttacttctgtgattacttacctagaaaattacagagtatagtgtctgtgtacataataaaccttgtctcttttgctctctgacctctcattgttccagagagccctgaagttatggccatcctccaaatgagcacatgcttggtttaaaaagggtcagtagattatctaccattaaaagtaataaggcacatagaaataaaattacgttcatactgtttgaatagtcctagttggttaactttttgaaaagcttgtattttactctcagaaatgtataatttttctctctctccctgccacctcctgtagactttcggtttttcaacaattcagtaggattgtgtcaataattagatttgtgcaaggctagaatcatgtctttggatatcaaatccacatctcaacattttcttctatcaaccaatctttagatacgaaaaactagtcattattaggacattaacttttttcctttccctctatcctccagcccaaatgtctgtgcccttcaacagattttgggcaccaaaaagaaatacttcagcacttgtaagaactggtataaaaagtccatctgtggacagaaaacgtaagtctcttttttttttcataatatgtcagttccaaaaacaacatcatgatgtatatgccttcccctgggtgtacacaccattcttcttgaaaatactgaccaaaattgtgagagttatttaaagaaaagaaaggaatacatacgtgaataaagaagttctccctgcatctccaatattactattagaactcagatttcttcctgaatccatgtgacatggaggccagaaggaagcagatcacatggctcaggattgggtatagaatccgtgtgagtaaatgatgttgtttctactcctggtttggccctcttttatcttaggcaagtcacttaacctctgtgacttagtttcctcattttataaaaaagtgggccagaaaaacaaactgatttaaaatatcagagtttctgaggcaaaaagttaatgtttgtctctagtcatttggaaattgtctaaagtattccagtttaccggagagttttcatcaaagtttaaagttaaaaaatacttgagttttatctctttatttaatccagtgattctccgttcaagatgctccatccccagaggtccacaaggtgataacggaagctcatcattatagttaatatctcaatagcccaaaggatgattatgttttaacatatgtttcactgattagcttaaaatttgaaagcattatttattacttaatagacatgccttctggtttattttaccaataaatattggtggaaaaaagtaataaacactctggacttattaaggtcaagaaccactcctgtgatccaaagtctttattttacaatgagggagaccagtcataaatagggcaagtaatgcaatcagaaaggtttaggtgtcatccccagtcaagaaaacagtgcaagtggctccttcctgcttcctattaatttgaagtccaccctcagtgaaggatcccttgagaatcaaaagaccccaggaagaacctgcttaatacatcagcattaaaattcagttaccctaagttcgggtggaataatttattagaaacttatttctaagttaataatattggtataaatcctaaacatgggccaggagtggtggctcacacctgtaatcccagcactttgggggggctgagacaggtggatcacttgtggccaggagttcgagaccagcctggccaacatggtgaaccccatctctagtaaaaaaaaatacaaaaattagccggatgtggtggcaggcacctatttgggaggctgaggcaggagaatcgcttgaacctaggaggtggaggttgcagtgagccgagatggcaccactgcactcccgagtgggcaacagagtgagactctgtctcaaaaaaaaaaaaaaaaagatactaaatatggaatcacttaacttcttgtagacttacctgtaaaacatggatttaatagctatattatagagtttctgagaaaataaaatgaattgataaatgtgaaattactaagtaaccataatgcataatatcaattgttcttaaaattaaactcttttaaacaaatgcatagatgtagacaggaaaggaagttgtgaccagatgcctatttgaaatgcacaagattgtctttatttctaagtaagaaccatgtatacaaggcatttaagcttagctgggttgcatctccacatggtaaccaagtctagggcaccagaggactttgctgaccatctcctgctcattggcttaatagagtttcaacatgatgttatcttttgacctgaacattattcctattattgtgcagacttctgctagacttgtgagtcattcacacaattataatgcaatcagttgttacaatgatctctgccatgctgcaagctaggccccagtagggactctaaggctctgagttttcctctttgttatttatattcttggataccatgaagcatatttgaaatgcacacttaactagataagaaaggaccttcaccctgaaatgttagggagaatgcttattacatccttcctagaagatagagaagaatgccataaatttactttaaccatctaaatatatgagagatgtcaaggcttgtacagaggctatgccaaaattctttcttgctttccattaaaaaaaaaaaaatcactactttgaagcctggctttttttttttttaaccagaaatgtaacagtgtctcctttgttcaattgtattagcttatttttctaaagtagattcattttcaaaaacatagttacgtctgggcactgaaataaatgtaaatgctaatttcaaataaccaaagaaatcaatactattgacaggaagactgactggtctgccatctgcttgcttctgctgaaatttccagagatatcatcaggactttatgatcagatgacagaaatgtttgcctttcagctgacagttgctctggggatttgagaaaagtaaactgagcaggcctaatgaaaaacgtgaagcttcctagggtcaagatattgtccaaaatatatattggtctagtaatatagtattctggaaacttcctctagagaatgtctgtgatatttttagctggcatctcatgaaatgttagatactattctgaaaacaaaaataaatttctcatgtttagagctatgtatagcaatattttttttactcttgttttgccctactgaccatatgggaacattgagttttgggtagcataaatgttcttctgaaaaaaactgctttttttttcttttcaaaatatccgctcagagataaccacattgttcaattatctgatgatattacaatgaactgctggaattttatctcatctactgcattaattctctacattatgactgacccttgtcatattagcatttgctaataataattttttgttaaatttccttttctattcactattttacttcaagtaagtattatcaatctatggactaagcacatttgtatctcattttttaaattgtttacaacatatgctaaagctaatatataagcaattgttaatcaatcttttgacatccaataattagatttatttacaagagctcatgtaaataaaattatttagaggctctattatgatttgcataaggctcctatataccttttatatgtttccaataccaactattcttcaaactatattaaaattagagaataacttgaagtgggtatttcccatttaattttgtctgtatttttagctatctattattcttaagccaatatttcatgccaggaattttttattaacaaataaagaatgaggatccaaggttataaaccagactacaaatcctagataattacttagtgtagcagggttcaatttgaaaacatttatttacttttattcaactctataaaatcatcttttatatcattaaaatttttgcttcttgatagtttgcttttatcatttttatcatactaaaaaaagattttattcttatacttggcgatctctttcatgtctaaattattttattcattcatacttcttgaatacaattaagacaactggataaaaagccagaaaagaaatagcatttgaataagctgattcatgtttaattagtgaattgcaaaataattaatctataattgtcataatctgtttgacatgatatttatcaattaaaaattacaaaacgatgtgcatttattttttacttgtaataatccccctatttctaattgtttggtacatgtacctttatatttcttttgaaaggaaacataagtaactatgtaaaatttgagttaaaataggctacctatgttagatgatgaagtccagaaaatattctatgaaatgcgaaaaaataaaaattaggattatattataatattaataatataattatacattaatataatcagtttttattttgtaagcaattatatataattttaaattattattttccctcaaaatatagtaaattagataaacttattttttgtatatcgtgatatcttgaattttctggtctgttaccttaattattgcctatagaacttaacacacttcgttaactttaaacaggatgccactttcttgaatactaaactctaatattaaaataaacttacttagattatttttatcaaattttacaaaaataaaaagattttaaagtttatatataatataatacaattaataatcctaccaacaattcaaaccaaatatggcattattttatctagcaatgagatagcatgttacggactccaatgggtcaatgtattttcttatgtttccaattatattaaagcagatttctagccatttttagtttacaaaatgatttcaaaagcattatttcatttgagattcacaattactctgtgagtagatattatagctactatattcatgttaaatgcttggggaaacagggactcctattgattaaatgacttgctcaaggttcacatgtcaaccaagtagtagaactaggacccaaatgtcgttcttctggatcaacattatggaacttttctatagtaacatgagactgtagtgagaaatcaaactcatagaaatatagaaaaaatcggccgggcgcagtggctcatgcctgtaatcccaacactttgggaggcccaggtgggcggatcatgaggtcaggaaattgagaccatcctggctagcacggcgaaaccccatctctactaaaaatacaaaaaattagccaggcgtggtggtaggcgcctgtagtcccagctactcgggaggttgaggcaggagaatggcgtgaacccgagaggcggagcttgcagtgaacccagatcgcgccactgcactccagcctgggcgacagagcgagactccgtctcaaaagaaaaaagaaaaaatcaggggggaaaaaaaacctgatttttagaacctcaacaaatcaagtcaataagtgaaatattttgtcaaatttatgtaaaaatgtatcctatttagtttctcattttaatattaattttcttcctatgtacaggactgtgttatatgaatgttgccctggttatatgagaatggaaggaatgaaaggctgcccagcaggtaaaatctcaattttttgaattaaataaggaattatatgcaaagaaagggttgaggtggcttgtggagaagccaattgtgtatgtgtgtattcagcaccatcctaaatccaagatatatccctcctatttttgtgttaatcatgaatttatgaatgataaaatataagagcatatttctcatgcactggatgctgggcaatacaacagaaacttagtcacaaatttaaattagttcagcttcccttcaggaacaaaactctttacaaaatcctgttctttgaacttgtctaggaacatggaactcaactacttggcaaaacttcatcttctctagttgaacagctctgattttataatattctttatattgaaatttggtttcctctacttctgccaactagagaaaaaaaaaatagctcatctatttcctctttgaaatggcagccattcagatatttcatgccaatcaccacacctttcctccagctaccttctcttcttgaataaagtcttctattctctggctaaccatccccaattcttttaatatgacacagactttgaagccctccccattataacaccaacccacagaaagtctctagtccagtaatctttcttctgaatacaaacctagactgatatttaaagtccatccatgtgggtctgagcatttaagacaataccaagataagtacctgatttggggacaccttgcactttggataatgtcattggtaaccatgttacatcattagcttatattgaatttagaatcaattaaaattgattacagttttttttacatacactattaagtcaggtctctaggatttgtttttctcaatttaggcataggaattacatggaaccttgttaaatttaaccttgttcattttgactcaatttctccatctttttagggtcttttaaaatcctggttttatacttaatagttgtgtcaccaaatctaaggatattcacaaatttaataaccattgattctatgctattaatcaaattatactaattttcaaataaatagggtcagaaaaaataagttgactgcacattaccagataaatcccttcaggctgacattcattcatgaatctttcttctgacgttcgggagaaataatctggaaggattgaatattttaaatcatttgctcccagaaattgtaatgaaaacaagcaggcctacatatttttagggacccaaatctataaaaatgatagatttaaataacagataatattgaattataattgaattattattgacatagcaggattgagatctaaataggttaaatgttaaaccaggatgacagtttaaatttttttttcctcaacacaaaggatatgtaaaataatgtttttcagtagcattttattatttagcactcaaaagataacttttatataaaaatgattattcatataattgtattgctaaaattattagctaaatgtcttgggaaacacagcataaagtttaaatgattatgaataatatcctgagaatattatccccagtactgattcatttcttgattatttcagttttgcccattgaccatgtttatggcactctgggcatcgtgggagccaccacaacgcagcgctattctgacgcctcaaaactgagggaggagatcgagggaaagggatccttcacttactttgcaccgagtaatgaggcttgggacaacttggattctgtaattcattatttttatcaatatatttattttttgctgttattgttatttcattttaactgacttattaacttggatattagtagaaattttatatctttctattgtacatatatgagaatacctaaagggatgagttattaagggaagtaaaatatcttaatacatccgtaaatagaataaatctccaggagacttatactttaatttttttaagaaggggaatcaagaatcagctaaaagggcacttactattctattttactcctttcctctttcctgtttgtttgtgaggatatgtatgtaatttcagataacatgtctaacagaaaggtaagttaagaagcctactgaaatttaaaattatcataagcagtattatacagcaatattttattacgtatgtttaattatatgtatatatatggatgttcaggttgtcaaatttgtatacatgtatgtggatagttaaatgaaatgtgaaaatacatttgattttcagacttttgtgcacagtctaatttacaatgccttaaattattactcaatttccgaatctataaaactgatataaaaatacattcctactttctactagatatggagatgaattgataattattactagagtgaaatatacataataaaatgtaggtatatatctgtaggcattatcttgctacactagctgtgtggttaattgcttgattatagaaatcgctcctctggttgtctttcaccgcatctctaaccacctctccagttccttttgctgactcatcttcttccttgccttaaagaattgagcaatgagaacacatggacacagcaaggggaatatcacacaccagggactgttgtggggtgggaggaggggggagggatagcattaggagatatacctaatgctaaatgacgagttaatgggtgcagcacaccaacatggcacatgtatacatatgtaacaaaccttcacgttgtgcacatgtaccctaaaacttaaagtataataataaaaagtaaaaataaaaataaaaagaatggaacttataagaatttcttccagcacttgactctgctctttaaatgcacttatcatggtttcaactatcactttagtgcatacaaacagtaaacctacgcttgttgtttggacttgtttcttcttggaacctcagtagaatatttctattgtttatcttagcatttatccttggatataccatctgcatctttaaacaaaagttatctaaaacatatgcaattttctttccccccaataaataattggttttttttgttgtcttttccccacaattggcagtaccagtgtcaatgttcagacttgaaatttgtaagccatccttacctcccctttctccaattcttaaaaactgctgttagcctcatctcatgtttcatctaaagtgatccccctaatactctaatttctgctgtacattaccactcaaccttcctgaagcctggttctaatcattaaattccaatgccacaaaatcttcagtggttccttatggccagtttatttcactcctcttagggcattaaagttatccacgttattgtcccacatacccttctaaatttcttagtattatctgagaaacataaaagtgtgtattaaccaaactggacaacttttgctctcttggcattcaccctatctcagcactggatttaaaagaccaccacaccattcctattcatttaaatctcatggtctatctccaaactacttccgaatagctgttctttcttattggagccctgaaagcatttttcccctctgtcctatatcttactctgtctacttttacctgctgctatatgataaacagttgtgactttttgctttacttatcattatatttcccatagcattgagtaaagcataatatgacacatagtgttggatagataaaaaggtacaggacagttgaattcttgaatttgttatggaataaacatgaaacccttgttaaaacttaagtgttgcatacaaatataatgtcatttttgttttcttttgtttgccatttaaagtattttaaatatgtgataatttcatatctccctttcttatcattttattatttatatcaagattgtctcttcatcaacatattcactttaaaaattgtgttctaagtactgtatcacattcaggatccttaagtaagtatctgaacttacaaaatcccttaaccaattagaataatataattttaagttatttatgtcaattttgtatgaccatctgataatgaaatgagaaaatagcaagagagtagaaatagggtgatcgtaagacttttactaatgttccacaataaattgaatttctatcattgcaatttttcctaggatatccgtagaggtttggagagcaacgtgaatgttgaattactgaatgctttacatagtcacatgattaataagagaatgttgaccaaggacttaaaaaatggcatgattattccttcaatgtataacaatttggggcttttcattaaccattatcctaatggggtaagttttatcagtaaaaagtacacttatgaaaaataccttctttaattttgtctatactttttatataatgctcacaaaaataataaaatgttagtgagaataaggtaagtgctatattatgactttacccccaaatctagggcatgtaaatttccaatctggttattaatttctactaaagagtgattgtaaaggacaaattacatgaacagttcattgacagtagacaggtattctagaaaaggaaattttagtagttgatatgtttgaaataatttatcgtagtagcaaaaagaataatcaaagaatgagtgttcttttactccccctctagctactgtactaactgaagtacttgtgtgtttggatcagattttgtgggaaactgccaacagggtcataggactttttccacagccagccaaattctcagggacgaaagaggtcaatgaagaaacaatttttaggaagttcttgtaatgtaactaattatatctatacaataattatttgtttctccctctcaaaacttaaattttaggactgattagacttctttacctaattcattgacccacattaaaaagtttatgactatttgcataaaagagaaaagcaataatttaaatgaaaaaaacacctttgccttatgttgctagatatgttaagtatgacttgacttgggttctcaactggttcccttttctcttacagtttcttttttagatataacaacatgtaaatcttcatccacagcgtttacatttacaatgtagtttcctgtatgttacatttactagtataaatgaaaaactgggaatgggcttgcagtctcagtggtcaatgggtatctctggtttcagcactttgatttttccaaataattataggttgtcactgttaattgtgctcgaatcatccatgggaaccagattgcaacaaatggtgttgtccatgtcattgaccgtgtgcttacacaaattggtacctcaattcaagacttcattgaagcagaagatgacctttcatcttttagagtaagtccaagagcagattgtcttgagtcattgaaatccctcttcttctcctgtcaaaatctaaaaacaataaaaatgctattaaatctggcaaaaatgtaacacatattttttgaaaggactactattttcattttacacagaagaaaccatctcatatgaaataataatatttctgtggacatgatagagtaagaatggttagtcacatgactggcgtgtatttagctcatttagaacgtgttcatctgttattatatgtactgctggatattgctacagtcccataaacatgggcagaattcccattcttgcaaacacaatttgaagaaagttggaaaagacatggttgtgtcaaaaagtaatattttgaagatttaacaacaacaaacctctatagtgtaggaatcagctccttcatgtcagcctaggctaagtgtgttgcaatctttttctggatttacaatgtgaaagtctctgaaaagcacatttgtgtttcaggcagctgccatcacatcggacatattggaggcccttggaagagacggtcacttcacactctttgctcccaccaatgaggcttttgagaaacttccacgaggtgtcctagaaaggatcatgggagacaaagtggcttccgaaggtagtttaatgtcttcatctctaaggagtctcccagcattctgagaagggaataaaaaagaggctagtccttaccaataatattagttttaataagcaaaggcagggaaaaatttttattctgagatgtactatgtcttccaaaagtccttaaaagagtaggcagagtataattcttaaataataagaatactctcaagatcacattctttcatactgctttcaagtaaataagtagtagatattcagaaggattagcaggtgttggaaagaaatattagatcatcaaattttaatattgtatgcacgttatgcaatgcttttaattctgtatttatgccaaaagatattgagttgtgagaactgtatggttctcttgggcctctaattactgatacacataagaatttggtggctttccaagcttctttgctgttgtcagataggttttacattgtgcttgcatacttcacttactcagcctatcccaaaatacatttaaccaatttaagatgagaaaattttaggatgcaggatagatataatgtagttgaggcatagatccctccagaggtccttcaatgaatcatctttatttggttactttctagaagttgccttccggaaataatttgtcttatcctcagcctctatcgacctcattacatgttatatacaaatattctgctatgagcagctattacaagatactgctcttgggtattttggaatttcacaggccttccttttctttctcttttggtagagagggatcttgctgtgtttctcatcatggtcttgaactcccggcctcaaacaatcctctcacctaggcctcccaaagtgttgggattacaggtgtgagcccttgtgccagtcaaagttcctctgaaaggaacaattcttgctttcacatcaggagttacttttttatgatagctggaacttaacctaccacgttttctaatactgcaccaatcatttcctgaagctgatctcctcttattattcctacgaagctgagctgtttctattttatagttgataggaaaaaacttttagaacataaataggattttaaagctgttagtgaatccttaggttttactacattttaaggaatacttagttccacagtgaaacacatcttttcagggtcaaatgttatttcccttgatctgaaagctacctgtttttattgtgttctccagctcttatgaagtaccacatcttaaatactctccagtgttctgagtctattatgggaggagcagtctttgagacgctggaaggaaatacaattgagataggatgtgacggtgacagtataacagtaaatggaatcaaaatggtgaacaaaaaggatattgtgacaaataatggtgtgatccatttgattgatcaggtcctaattcctgattctggtaagcaactttttttgtttttgtttttgtttttttacttactgtaatttactaattatgctgtctcaaagagtaagtccatgaaaaatgaatgtgcagtataaagaatggcatgcaaagcactaacacaataaatagtgagctacttgagcactccatagataggcagtgtagtgatgggaactccatgcatgaatctttggctttctagggtttctgacatctaatatttataaccgttttcacagtgccagagtttttcttggaaagagaaggaaagatctaaccaaatggtcagctttggataaatggaaaagctatggaactcacagtatagagagaaagatgagagatgaacaatagagaattaaagaaacatgtagtaggaagacagaaaaatattttccttctgaaatttatcgtgattatcaactcccaccaaaaaatggaagtggaactctcttattagggaggaggaggatgtcttatcacactgacattgcagtaaatagcttacaatattagaaaagagtcaggaattgatttactagtttcatgatggagataatagcaatgatgacattgttgtgatggtgatggtttatttttcagccaaacaagttattgagctggctggaaaacagcaaaccaccttcacggatcttgtggcccaattaggcttggcatctgctctgaggccagatggagaatacactttgctggcacctgtgaataatgcattttctggtatgtgctggacactgttgttcctgctctctgcctacacacctttttttctttatgatgattgtttgcaataagaaacaataaatgttttaggaggtgttgattagtttctgcattggctacacatacaatgtgttaacactacatggtctctactaaaatgttcttcatttctaaacatttcattataatggataatagcctacagagagtgaaatttgtaatttgtaattaagactattcaggccaggcgtggtggctcacacctgtaatcccagcacttcgggaggccaagacaggcagatcacttgagatcaggagtttgagaccagcctggccagcatggtgagaacccatctctactaaaaatacaaaaattagccaggtgtggtggtgcactcctgtaatcccagctactcgggaggctgaggcaggagaattgaactgaacccaggaagcagatggcaccactgcactctagcctgggcgacagagtgagactccgtctcaaaaaaaaaaaaaaaacgaaacttaaaaaaaagcatatttagtttctctgtgaatctaatatttccagcacaataaggatgcattgacagatctctaaaaaaataaaactgatttctttatttgataccaacataataatatttagaaataaataggtgtgttttgcatctcaaaatttggacagtaagggtgtcaaattataaataaataaaatgaagagacttatacacttccatatcatgatgtaaaatagtatatataaatatttcacctagtagttgctattcacagaccatgttcagattcatgcaaccttcgacctttctcaggaaaatgatttcacagacatatttaaattgttaggcaacatttattaattaaaaataggtaacacaattttttgtttttccaaatgctaaattgtgatataaaaactattaatcaaaaaaattgaattcctagatatcctgactttcttctttgtaataatcctgcccatgtgttttgacaataacccatatttaagaggttgtttgctttgattctctttccagtaatcaagattaatttacaaaggattcatcagtagttctttcatgtgactaacagatatctaattatcagacaaagccttggccaccattaaggtttagcatttgccagtgaccactataaaactatgtagcccttacagaggtgaaactcattgattgaactggttggaactgtattattgtcatttaatacaataggtcacagagtttctacttggtgaattgaattgttagtttttagcatttggttgattcatgtattatatgagtgcaaaatccatgatatcaataatgtcagggattatctgtttatatgattctgtcttaccgggagaaacttcaatgttttctaaataaaataatgctctttcttaatgaatttatttacagatgatactctcagcatggatcagcgcctccttaaattaattctgcagaatcacatattgaaagtaaaagttggccttaatgagctttacaacgggcaaatactggaaaccatcggaggcaaacagctcagagtcttcgtatatcgtacagtaagtgaatcacaacaaaataaaaagtctgtcaaatgacatgtcaaataatgctgtttcaatgaatatttcacagaattttatgagtgtggttctaatagtaaatattcatagaagcatcagggaactgggtagcttgggtgaaaagactgtgagcaaagtccacaacaagtgctatgtattcaaaactcagatagatattttgcatgtgtttcattatgaataactttctattctagagcatcaattattttaaattccagaaagcagtaaattttttaaaataaacttttcctttgcagagtactttacaattttcaaggtaattctgttctctgcctacacaccatttttctttatgatgattgtttgcaataagaaataataaatgttttacaaggtgttgattagtttctgcattgactacacatacaatgtgttagcactatgctgtctctactaaaatgtttttcatttcaaaacatttcattataatgaatcaaatatgcaaggtgatcttatactgtaaaataaccagtcagcatctgaatatcttttgaatggctttcaagataaacctttattggcacatagagatttctggactctaaaaaagggttttaatgtactttttttttttaagggacagaatttcactctgtcacccaggctggagtgcagtggcacaatcatagctcactgtaaccttaaactccttggctccaggggaccctcccacctcggtcttctgagtagctaggactataggtgcacaacatcaccctagttaattttttaatttaatttttcttgagacagggtcttgctacatttcccaggctggtctcaaactttcagcctccagtgaacctcctactttggcctcccaatgtgctgggattacaggcatgagccgctgcacccagccctaacatacattttgctgcaggaaaatttatagaaatattgcttatcaaaattacagttcaactaatgatacgttcagtatttgtccagataacacgtacagctacaactaaaagacttcacaggaagtcaggcattacctagaactgaatctggcacatgtcagcagctccctgcagctacaaaattccaaacatttttaagtatgcattaaatgtgctgcactttaaattttgtatatacaaatatatgtgtgtatatatatatcacgttcgttcaaaaagctatgaatatgtcaatgatttgacttacaatgatgaatagggtcttacagtcaagaaaataaagtaaatatttgtgaagatcactaaaagcactaaagtgaggaaaccttacagatagtgttggccaaaagagggtctagagaaatagttcaaatctgaatagaaattataaaaaatgtagaagtgggattccatggaacttttgtaatttattgacaaaattacctgcctgatccataaggtagcttgacttttaataaaaaacccggctagataagaagtgtcttgtgagtttgtgtgagccattgaaaacagaggaaagaagctgttcccgtggcctcagacaccaggcaacctctcagaagggccgatccggaaacttaattatgtagttacatctatacgggaaatttcaagcaaggaaaatgacaccccatacctttctttcctttcctaggctgtctgcattgaaaattcatgcatggagaaagggagtaagcaagggagaaacggtgcgattcacatattccgcgagatcatcaagccagcagagaaatccctccatgaaaagttaaaacaagataagcgctttaggtaagcctattagtggcacctccacagagaatgagagctattggcatatttttgtttcataggcggtatcccaaaaggcattcagtctcctatgtggttgaaaatggaatttagaataaaatgttcatacaagtgttttcaaaattgatatatgttttcgctgctactttctggtacaccgttatatgatttcatgtgtgaaaacaaatctaacagactaaactacttcttgacatttttcttatagtttttagaaattgatggtatatatagcaaagactatcttgtagagtattacatgataaaaatgcttcttttttgttatgtgtgaccttgtcaagttttataggatgaaatcagatgaaaaaaattaaaaattgtattgtatatttcagtcatttttcatgataaaacttttaacaggtaaattgtattcgaaacatatgaaaatgtatgagcagttctctcatgctttccacaatacatggattctattctattacatgcactgtaggtgaacatacctaaatctaaatctgacaaaatacatatacattcttcccacttagcaccttcctcagcctacttgaagctgcagacttgaaagagctcctgacacaacctggagactggacattatttgtgccaaccaatgatgcttttaagggaatgactagtgaagaaaaagaaattctgatacgtaagtggaagtgaattccagatattttccctttcatttcaggatctcacttctttctcaagctttcctgtccagatgtctgccttaaaaatgccccctctctggtattcatggttagctttagtttccttttatttcgtccacttgggatgtgtggagggtcactcagtaatgttcttaaactgtgaactgttatgttgttgggctagatgttcacttatgtggtttctattaaagaccatgtaatcaggggacaaagaagaaaacagttataatttagaaaataaatagatttttttctcccagtaagttgggttctattttgattaggctaattgaaataactatgttttgaaatagcatcgatatctacttgagagaataatgatattatgagaaagtacaatatggaaaaagataaagactaataagtgttttgtttcttagtccttatcaaaaagtcatattattcaataaaaataaacatatattttcccctaggggacaaaaatgctcttcaaaacatcattctttatcacctgacaccaggagttttcattggaaaaggatttgaacctggtgttactaacattttaaagaccacacaaggaagcaaaatctttctgaaagaagtaagttgtctagaatgaatttatgatagtgttcatccatcattaagttatctaaatattcatccttaatgaaatttcctcattgaaattgcctcctattttgataggtaaatgatacacttctggtgaatgaattgaaatcaaaagaatctgacatcatgacaacaaatggtgtaattcatgttgtagataaactcctctatccagcaggtttgtaattattgaactcattgataggctaagtctttttttaatatgaacctcgatttttattttatgctttcttaccaatattcatttaatatttctcttcatagacacacctgttggaaatgatcaactgctggaaatacttaataaattaatcaaatacatccaaattaaggtactaaaagttacttgatttatttctttttttttttttttttttgagatggagtctcgctttgtcgcccaggctgtagtgcagtggcatgatctcagctcactgcaagctccgcctcccatgttcactccattctcctgcctcagcctcccgagtagctgggactacaggcgcccaccaccacacccagctaattttttttgtatttttaggagagatggggtttcactgtgttcgccaggatggtctcgatctcctgacctcgtgatccacccgcctcagcctcctaaagtgccaggattacaggcgtgagccaccgcgcctagcctaaaagttacttgatttatttctaatatgtagaacatatattacaggtttaacataacaggctagaaatgtacgcattaataagtaagtatgtactgggcttggattactctttgttgtttatgtaccactgacccacctgtaaagaaatggcatcatttcttcatggttttgttcaacaaatatctattaaaagctactcaggaccaagtattgtgtaaagtgttatgaaaaatatgtatttaaattggacatgtctttattcaaaaagtttacagtccaatttagaaaaataaaatggtacataaatgactaaaatcgttgtatcattcaatactttcactgcagaatataaaggaaagaacattcacttataaaaaattgtcactcatcacagattaaagggaacggaatatttttcttctttttcaatgtagggtaaaagtagcaggaaacataaaattgtgtttcataaatatatttaactttggattaattattatataatttttaaatctctgagtaatgaatccaatgatttttatgccctctgacctgatagcattgaattggaagatgatttatatgaggacttcacttctattaagtgtaataatagcttcactatttttactttaataagaattaaagtggtgccatggttttgttaacacaactatcacctttcatgttactaaatataaacatttattttcagtttgttcgtggtagcaccttcaaagaaatccccgtgactgtctatagtaagtatataataaatattggccacctgggtggcaaggtatgaaaaaagaaaacaatacatttctttgtatttacagagattattgataatctggtatttagaattccaaactatggccaatctcatttcacttgaaaaaaggattgaggtctcagataaccttcaactccaatgaacttcttccccactcattggaaaaacagaaatgatatgacatgagaaagacagcaaaatataatattagcgtggcaaagagccaggaaaataaaaagacatataaagggaagagatggcgaaaagaccctctagaaatatctaaaaattcagatgtgtggacacagaaatgaccttagccaagacttgttgttcacgccaccctcaagccctgagctatctaagggcaggctgagaagcacgtgttgaagaataccaatgtttataaggtggcagttcaaaaactctcccatccaaaattggacaaaggaacaaaaaaatctgccatgtgacaaatttaaagtttccaaattccagggttctttgatctctgacacaaccagattatcaaaattaaacctctactacttaacaatgataaagggtatttcattctcataagtgtagctagtagtatatcttttccatcatggctttttctctgtttatcttttctctctttctttatttcactgtagctttcaagcagaaattcttttcattttgttttggctctgtaattaaacactcaaagtgtatcagtagctaaaacattacttcaatacccacatttattctggctagaaaatcattccattttataccatgagcatccagttatttaattaagaaaatttcccttaagatttatactagatatggaaaaggagtaaagccaatgtaaggagcaaaacaaaatgtctgctgctgttgttgatttcaattatgcaataataacatgcaattccaggatcaggccagctcagcactgtattaaagatttaattggaatagttatgattcaccatgggaatacaatcttgtaaaaaatatgttttctgaaaattaagcaatccttatgggctctattcatcagacatgttatgtcatctttcttcatcaaaggtataaatatatacatatgcatatatatatatacacattcccactacatttctttagcttcccttctttatccatcttagtttcactactttctatatatgtgaatgcaatatcttgattacaatgagcaaaaatataattattttctcctactaaattacatcctcactcacagagcataagctacattttattaagacacacatgttcaatggtccttccctacctacccagaggccttgaaacagctctaacatttacattccaatgtaagatgtttcttttactcctccttagacggtatgctgttattaagaagtattttaaagtagaagtaaagataaattaaaccaaattttctatttttatatttcgttgttgacttgtttctaaaattcctataattttttgctgcatattatcctcatccccaaaataacatccattttaaagtgtatagttgaggggaaggatgctgtttttggtataagttgtcaaatatggaacatttgacctggagagggctaaaatcaatatttaatcctcagagcttcacctgtcaaaactatttaagtctgcagaaaatcaagattgaaatgaaaactaccaaccagctgaacatccaaaacgtcaaattccttaacatgatgtaaaaaatgtaagctaaaaggaattagtccattttgatagcagcaatagagagccctgtgtattcgtattcgactttcatggaaaggttcttctgtggcaagaccacctgtggaactagtacctaaacacacagatttgttttattttagagcttcacaatttgagatctcaaaatacaaaacctaataaggctgaaacacagggtctatgaaggctaagaacccacattaattcaaaaagttgacacagctaaacatcttacaagcatgaggtgagaactgcagaaaccaaagctgtgctaacatctcacctctactgctttgatgtgatctagatgcacagttagcttcagtgtggcccgttatctaatagaaccatctttcaaggcttttcattagaaatgacaaaaagccagttgctctggctgtgtggcttcagaggcacatttccagttaatcagtacaaccaaagtcaaccaaatagttgactggtatttaatttattttaatttacttttattatagatctaggggggtacacacgtaggtttgatagatggatatattgagtaatgctggggtttaggcttctagtgaacccatcacccaaacagcaaacatagtacctagttcaaagactattatcttacttaggtagacgacacacgtttaaaatatatacctttaaattaaaaaaaaaaaaggatagtgataacaaagctgaaaattaaagacattttagcctataacttaaatactgatcatatcatgtttgttgaatagagctcatgtctggctggctgaaatttattcttacttttaagtattctgaactatgtttcattttttcctttctatgtcactgttatcagatgcatgaaaaacattttaaaagcctttttctttcattttttcttttaattgagaaagaatccagcaatgcaatttaagatattatgaattgcatgacattaatcatatttgtcttctgttgcaatgcagccagtattttcaagaagtacaaaagaaggtaaagcgctttagcggtacaattaaaaattacagatttctagatataattcctcactttgtgagtatatatttcactagatcaaattcaagtcactagacttcagagttcaacacctggacatgagaagatattatattatgtaccataaatatttcctgtatctgactgcctgaacatattaccacatcctgtgccttagtatcctacagagacaaaaaagaaaaggaaaaaaaaaaaaaacctttgttcaggtttttatgtaaatatttttcatgttccactttctatactttcagcaactaaaattataaccaaagttgtggaaccaaaaattaaagtgattgaaggcagtcttcagcctattatcaaaactgaaggtaaaaatcaatgttatacatggttccttttatagtaaaaacatctgtaaaaatactgatctctatgaatgtatctacattcttttaaaaactaacatgttaaatgttatataaccaatattataccaatggcatgctcatgtaattgcagaatgcggagtgcaaattatttagcaaagtagatgatgcattcctaatactttcagtacatttgcttgtacttgatttaatttgaatctaattggcattgcattaacttagtatacagatactcactaaacaaagacatgagttttttttactttagtcagactcctacaggctgtatactctttatgttgctttgtttgcaatctcccacatgttctttcttataacagtgcaagaagctcttccaaaaaaaaaaagtataggcatttttcattgtgtaacataagatagcatagaagctatgtttactgaaagcttttaaaattacaaccacgcatgagatattttttaattagaccatcagaattataaaacaaaatgagtagtttatgcagtgaattgatttttaaaatacttaattccagccctgaacatattattacatacagacgtatatattatacatgagatatatataatacagacacacacacacattctctcctgatgtttcagactagaacattaaataagcagttacttttctctctactcccactatgtatgttagccaacttcaacatctttgatgttactttcatttcatgtattttaattatgtccaaggatcacaatttaaattttttaagatttccatgtataagcatcttaatgtagcaacttacccagagaaaagaactagttatctcctttgtgctataagaaagctagaaacagtcttccaaaaagagaacagattatatctttgatggaatctttgggaaactgtaattatacttatgtttggttttgctatttcttttggtggtttgagaaggtaacttcttgaatacttttatctatattttttaaagtaagtcattaatttaaatttatacactgaaaatacataggtaaaaacttatttcctagctaattagttatctatattagtatttattcttgagacttaaaattgagttattctttgaaatctatccttgtttttttcttgaaaaaaatactataattataattatttaatcgactttctatagtgatgaagacaattcggtattttaagaagaaattaaatcagaaagttttgttgaaaaaatgttccttgatcattgtaataaaacatgacacaatgatctttgataatacaattgattttaaaatcaaatcttgtcctgtttttaaaaatcagattccctaaaattttgcactataattgtgcacagcttctttacctgaaattatttacatgtgccaatgttcttattttcaaagattcttctcctttgaagcttctttattcaacttatttatctcctcaatctttgtcagtaggattctatcctactaatctttattcagttaagatcatactggcgggtcatctctacatggcttcttcttataaagggaacatggatgaaaaatggagttgtgtcacctactcattaataacttgagttcagaaattacactcctgtgtagcataatgaaggaaacaaatatttatcttagtagtaatttacaatggtccagcttccaggattgctactggcatttccttcttactatttgaacaattacagatttattgatgacttttaaattcttactaaatgaattaaactccaggacacaattttaaggtgtctcttataaaagatacataacagcattttggaattaagaataaatcagctaaaattcaattcaacaaatagttattgagcagctattctgctgggtactttctgaggtgttgggagtaaataggaaaacaattttgagaaaatctcttcttttatagagcttaactataaaggatgtttccaaaatttcagtttggcttttctaaagaaatattgatttagatattttattaacgcatttttggttcttaaattccttaggcgtcctttcttttgaagttaccgcaccttaaaaacctggctttatgttttgtgctcaatatcccttggccttatatatcaaatattatggcatgaaatacttatggtttcaaaaaactttacttttattttcattattttggattgttctaggctggtttcgttttggtaatcatgtacattgacaatttctgaacaagcaaaaaaaaatgctctcaaagataagcaagcaacagttgcattccactattgaaggctattacagtatgagttaaatgtactgaacttatttttcttactcctctgtgaaacagtcttaattaactaatgtagtaagcagctttctaaccttcaaaatgattttctgtggtagcaaaatcattttgcaagtcaaatgcaacactagtttatcttttgcatttgaaggactgtttaactattaactggttaattgtgtatcattcccatacagaaggtaagtactcaaattattttcctcataaaacctgacattcagcatcttaaaggtaggtatacatttggtactttcttatgttcactcctatacccactagatcaaaaatataaggtactgagtgattttaaaacttaaatgaaaaattttaataaggaaaaagtaatagacaatatcagtatgataaagtgggatctacaccagttatcagagaaacacaaatgtgtacatactgcatgatctgcaaagtgtagccacatataatattttgcataatcatactttataactacgaataaacagatggatttatccatctgtttaaaagctaaagcagatgaaagtaattttagtagcacacaaacagactaaatcatttgttctcataactcttgtctaatttgaagacaatgggaaatatttaaaagtgatttcatagagcctgaaaccactttgacatttgagttgagtcacaccgaatgttgaaataaatgtcctattccggtaaatttaaaggactgttttaacatgataatttgtctcctaaaataatgtcccaggacccacactaacaaaagtcaaaattgaaggtgaacctgaattcagactgattaaagaaggtgaaacaataactgaagtgatccatggaggtgcgttccttatgttacctggggccgactaccttcgctgtgattattttgaaatagtgttggtttagaaatattgaacatctgatattttctcttagttcttattttataaaaattgtgggaattatttcctcagctatgagttcttattagctggtcagaaataaaacatagttagcttttaatggatctagttggaattaatttatctattaagtcactgggcccaacaaaatgtcatgatttttgcatatacaagtgaggattgtggaataaaattgtaacattaatgtcagtataaaaggaaatattagaaacagtaggaaaaaatgaccattgtataagtctctgtctaataagccactccactactaggatttatgatagggctcccattccaatgatatagaactccctggattctcactaagtatttattccacatccagaaaacaagtatgacatggagagttaggatgtcaaatggccctctctctcaaccaagattcaggacatagctattaccttttagatccctattgatatgatttttgggggatatgttctaaaaatgtttatgattgaatcttaaatggtaatatttgtagaaatatagttaatcattacaatgtctagcttatggatgtatagtcacaatatgagggtaaatcaaatgcatttgtattcccctgcttttagagccaattattaaaaaatacaccaaaatcattgatggagtgcctgtggaaataactgaaaaagagacacgagaagaacgaatcattacaggtagccattaattccatacatggatctatgcctagattataaagatcaaattatagttaatccccaaatataagaatcattaaagaaacaagtcattttcatagtgattactaaagttacttcatattttggcagatataatattattctaaatatgtaatctatgttttactctgaattgaaaatttgtagacaaatctaaaagcatttgtttttattacatgtatgcatacatacatgtaatatgatataccattgatatgatattccattttcactttactgtttgttaatgagttagaggaccctagaagaaaagccatttcctcatttgagcttccattaatcttaaggtctgtacatctacctgccaaaatagaagcaagtttatacaaagcaattgatcaatattttcagtaaacctcatatcagacttccaaactagcgtccagttggtccaaattagcctaaaattcgccgaaaatccttaattcagctattctttaagtatttgtttaaacaattagtgagcaagtgtggcttgtgccacccatttatggaaataaagttttatcggaacacagtctttcccatccatttatataatacctaaggctgctttcacactgaagtatcagagttgaacaatggcaacacagactacatggcccacaagtgtaaaatacttactctctgtcacttcgcagaagaagtttgcctacttctgttttagacctttttcattgtccttctcataggtcctgaaataaaatacactaggatttctactggaggtggagaaacagaagaaactctgaagaaattgttacaagaaggtcagcatttctaggaaaataagaatgtgactttacctaagctatccatatacaagtctaaaataacattctacatgttttctactctatctcaatctattgttcatttccataccaacaagaaaaaagcacaagaataaggaattaagcataaatggcagtcatattttttatacagtattttgttcaacaactttataagaatattagtatgtcagaaaacagcactaaaatttgtgaaagaatcgagtgttgggctggaattcattattgggcagatgccattatttatgacataaagtctgctgtctttattttgttatataaaccaatttctgctataaacatgtatcctctcagaggtcaccaaggtcaccaaattcattgaaggtggtgatggtcatttatttgaagatgaagaaattaaaagactgcttcagggaggttagtaaaaggacaacaactaacccccttaacaggttctagtgactgagttcaactttttaaagactgagcaagcagattttttcttttaattgggttaaaaaaaaaaaagacaacatccactgttgtcttaatagatggattggttcaatggtagttaatagttatgaagaaatgattactagtttaaacagtctttaaaaagttctatggtataaagtttggggagcaatgaatattttttttgctttgattcagataattttaagggccttttaagtatgcaaaagggaaataattgttaaattgctagctgttaaacaagcccaaatttgatatactttttatatttaaaaaattatattcactgcccccataagagcaatcaaggcatgtctttaaattctatacatagatatagccaaaaatagtgcatttagtaacattcttttccaaaactatattcttgggaatgaatatctgtttcttctaacagtttgagtgataatctatacctgtagatataagttattttgcatataaaattaatcttaatcttttatggaatgttctctgtctgtggcattaaatgaaccttaagaacaaaaaaaaaagaattcaaaatcttacacaaaccctacatagtaattattcaaagatgttgtttatatagatacataatttgtatcattggcatttgaataaacaaatttctacttcattttttaacaaggaaagaattaagctgaaaaattattttttgtgaaacatgtatttatattctttagaaaaaccaaataggcactttgaaatatactattaattgagaaacataactgaagtttgatgtttatccaaaacacagtccagatggcttttcagcttatactttttaaaactgtatcactatgtccaagaaaatgtaaattatcttgggactttctatatttttagcaattattatttctatattctgtagtttaataaacgtaaaatctcttaaatagtatttagaaacttgtcagtgatagtttaaaaatttttaattcaaccaatgattgaattttccctcaatagaaatatatatgtctgaaaaatacaagtttcctcccagaattctaagagtacatagcacaacagagccataacggaaccaaagattcctgtaggatctaacaaagaattcactatctacccctaaatgctcaactgtctgctaggaaaaaaatctaaggatttgagggaagagacaaacacattatgaagattaaattgaattcttttttttttctttcagtccttgccatagtaagcagctttgtagaatggtagtgctttttagggaatcaataaattagtagctgcatcagtttatattgctttaattcatttaggattaaatttcaggtaagtatattttcttcccctttgataagcccctgttattgaggccactatgaaaaatccagttaaatactaaagaattgcttcagccaagaaaacatataactgctacaagttaagtatatgacattcaatttttagttaatgaactcctttcttagctcttgcctctgatcatcccagaagtttattcctttagttcccagtgtatgatctctctacatatctgtaaggcatcggttttcacaatgccacgtcaactattatagcattgtgaaaaaacaaaaaaaattaaaagtttttatcaaatcatttctccaaggttttgctttttgtaggaaaaacactatatgcggtagaattactagtaccagcattaattggacatgcttgttttcttttttccagctatctaaaaccatcaggtcattactgagtcacaagtatccccttgtctagatcctaaaaggcattgataaaagaagctagtaaagattacactatgtaagactttttttttttccaaggtctggccaattaatacatatctgaaccatgctcttcaactcaataagttctacctaaaactgaattttctatctaaacagttcatatcgtatacattgtggtacatgtagtacattttttttttttttttttgagacggagtctcgctctgtcgcccaggctggagtgcagtggcgggatctcggctcactgcaagctccgcctcccgggttcacgccattctcctgcctcagcctcccaagtagctgggactacaggcgcccgccactacgcccggctaatgttttgtatttttagtagagacggggtttcaccgttttagccgggatggtctcgatctcctgacctcgtgatccgcccgcctcggcctcccaaagtgctgggattacaggcgtgagccaccgcgcccggccatgtagtacattttttgtacttttggtaatttgagtatatttctcaatcatttaagtcatgactattaacatggctaactggtactttgagtactgatgttgtgatttgtcactgatacacttccaagaccttaactgaaaaaatttctcattaaatgcataaaatttttgggcttaccttagaattatgcattctgaaacgactcaagcaattaaaggagaataacagactatgtcgaaaggaacaacaacaaaaagtcatttttgaaggttttcgcaaatctgccaacataagaggttaagatttgtaacctctatagagaatagtagatcgagttgtaggtctgcattcagtctgagccccaactcaatcccaaattagttgactcttttcttgcttgtttccttcatctgaaagtgaggatagtagtgatacctacagtctaaataagttaatatatgacaagctcttagaacaatgttcagcacaaagtaagctgtcatcaaatgttactgtcaatcatcaattgacattaacatggtcaattaagtaatgtttctcacccaactttaaatttccatagtcataaccatggaaacatacaaaaaacaaacatgcaaataaaatgtcaaaataattgagctgagtactttgcatgctttaggaaataagatgtagggtggttctttgtgccaatatattcaagtaattggtttatcttcccatgttttgctgctctaaacatgatctaatataactctcattcatgttgacatagcagagagctgctaggagtaaacctgttttctacacattaatcaagctgttctttcaaagtatttgtttgacacattgaatgttttttattctggaatattatcacagcaaaacctcattaattggatgctatcaaaattatgaaaggaaatctgagtgagcacacttgttttgaaaagaaattggtaaatacttctatgatgcagttttaagttatacaattaactgctatttggaatttaataagtccactataagcaatgtgcctgcacaccaattaaaggttggatctgtctcttcttgacaattttttagaagccattatttcgttaccaaataaacctgaagttaagaaatatttatatttacatctatttatatctgttggagaatatttcataactcagacttggttgttttacacagacttctccccattatccaacatagtgagatttttctatagttctatattttactctagtattaatgtggttttataaatgattatatgccttatattctggggggaaagaaatgtgaaaatgtgctaagtagacagaaacagaatatataagttgttttgaatgttatttcttttttaaaaaatttgcttggtgtcatatagccaaaactattcatggtgacagtttcattgcttactttttatatgatttcagcgaattgaaaacatgtatataatagaaaaaactggacttcatgctgagtatagatgatacatataaaagaagtcaaaatttggagaaaaaatttaaaaagataagtagaaaaatgaagtaactgtagaaaccatacttactctttgatctcaaatgcccaaaaactgaatgaaaatgtgaatttaggccgaccaggtagtcttgtcaataaactaaaagaaaaacaggaaaattgagaaatatgttacaactataacaacacaaaacagcatagttttgaaacacttgcagttcttaaatataaaagcttttattagttaattttttaaaaggatctcataggattgacactgaatcaggttgggaggtggaacaagggtgatggcatattctttctgaattacttattataacatttctagaatcattaggtcagtgctactttgttgtcgtcaatgtacaataaaggaatcacaaattgatcttagtgataattttacagaggcagacattgcacataggtatgactgcaaaaatgggtggctaactctgggaagatacttgtgttaaactttatatgacatttaataacccttcatcataaggcaatgttttttacaaaaagattgaaaaaatcatgtaagtcatttactctgcaaaaatggcacattaggtggggttccaaaatccataatgaaacaatgtgttttgcaactaagaaacattcattatgatatatggaaaacactgtctgtctacttgtcctttacgaaaaaatgtaaaactctgaggatcataaaatttaactactaaaaataatcttcgtgtttaagtgatacttatttaagactttacactgttctgtttaaccatggtctcctgtctgattttagccataattgcgaagtatttctaactacaacaatttaattttagacacacccgtgaggaagttgcaagccaacaaaaaagttcaaggtaagtgtattggctatagtaatgtgtgtatatggcctcttttgttacatgaagagaaatcaaacaataggaaagattttaaagtattttattgaaacttgttatcgatcagagagaaaagctagccagttttgatgaaaacaattttgataacaatcagaaaataaatttctcatgttctatactatcagaatctaataacaaatattaagggaaaggtcaacatactcatgtaaactgctaggcatattgaacccttgagatagactcaagtgtatattctccatacatatatatatatatatatatatatatatatatatatatatatatatatgtaatgttttgtatatacaagtatacatataattttgtgtatataagagttaagtcaaaaagaaattgttgaatatcagagataaacaaatgtagattgcaggtggacctgaatccttaaaaatgttattatgtgagacaatgctacagtttgagacataagtaaataagaaatgtatatatgcaaaaaaccattaatatagctatttacaaaatgttcatttaaatatgtagattatatatgtatatatcacatgtgcattacaatttatttcataattacactatgtgcatttgctaattcctccacttaagttatcttacattccaatacattgagagagcaagaatttcccttgtggaagctagagtaaattgcaagtttggaattgcaagtttggaatttctgggttaattagatactagtagtgaaaaggagacacaaggcttatcaatgcgctataggaacttcttactttaaaccaatccaatatacagacctttgaaagtaaaagatcaactgcacagatattttttaactaaagaatgtgtcagtaaatctatgtaaatatccaaattgacacaaattttctaaagagttaaaattattaaatttcaaattattattttatatacttttgatcaaaatataatatttgcttcaccataagttgaagatattaagaaaacataatctaaggtttattacaaaaaataatggcctctgatagatatacagagaataatatattcttaaattttaaaatttcctaacatttacagtctatacattctcctttctttctaattaggatctagaagacgattaagggaaggtcgttctcagtgaaaatccaaaaaccagaaaaaaatgtttatacaaccctaagtcaataacctgaccttagaaaattgtgagagccaagttgacttcaggaactgaaacatcagcacaaagaagcaatcatcaaataattctgaacacaaatttaatatttttttttctgaatgagaaacatgagggaaattgtggagttagcctcctgtggtaaaggaattgaagaaaatataacaccttacaccctttttcatcttgacattaaaagttctggctaactttggaatccattagagaaaaatccttgtcaccagattcattacaattcaaatcgaagagttgtgaactgttatcccattgaaaagaccgagccttgtatgtatgttatggatacataaaatgcacgcaagccattatctctccatgggaagctaagttataaaaataggtgcttggtgtacaaaactttttatatcaaaaggctttgcacatttctatatgagtgggtttactggtaaattatgttattttttacaactaattttgtactctcagaatgtttgtcatatgcttcttgcaatgcatattttttaatctcaaacgtttcaataaaaccatttttcagatataaagagaattacttcaaattgagtaattcagaaaaactcaagatttaagttaaaaagtggtttggacttgggaacaggactttatacctcttttactgtaacaagtactcattaaaggaaattgaatgaaattagtgtttcttgagtttttctctttttaacttttaagctcaggggtgtgcaggcatgtgcaggacgtgcaggtttgttatataggtgaacatgtgtcatgggggtttttgtacagattaagttatataaagaatcattagacggccgggtacagtggctcacacctgtaatcccagcactttgggaggctgaggcaggtggatcatgaggtcaggagatggagaccatcctggctaacatggtgaaaacccgtctctactaaaaatacaaaaaattagctgggcgtggtggtggtcacctgtagtcccagctactcaggaggctgaggcaggagaatggcgtgaacctgggaggcagagcttgcagtgagccaagattgcaccactgcactctagcctgggcaacagagccagacactgtctcaaaaaaaaaaaaaaaagaatcattagataatgaagcaatcattaaacatcagctgaatactgaatataaccctaggactctgctaagctgtgaggattcaaaggatgaatcaggcacatttactgtcctccaaaggtaaggagacatgtaaccaattaacctcaatacaccattggct

SEQ ID NO: 4 - DNA, 116253 bp, Homo sapiens
attgttggtacttcagagttgggtccagagtgtgaaagtgttcccgggtagcgcacaagtgtgttcgtgcagtaaagttatggtgtgaaggtgttcttgggtgtggaagttggcgtgcacgtgtggcgcggagcggcagctgcgtgcgtgtgagcgtgggaaggagatcccgggatcttcaaaagctgcgcgagtggagtcggccgtgcggggcgtgcaggggcgtggaagtcggcggcgcgcgcggggaagcgggggagccggggatcggggaggcgagagcgcctggcccggcggccccatcccatgcccgggcccgggcccccggtcccccgccccgtcccatcccatactccaggccgggtttggcggggagccgggccgggccgcggcccgcgcggagggggctgggggcccagacaaaggcctagtaggctgcgcggccggctggggcgagcagagcccgcggcccgggggcggtccgtgggcggggcctggcgctccggggaggggcggttcgggggcggggccggcgctgcgggggcggggcgggcggggaggaaagggggcggtggggagagggccgcgctgtcccgagctggccggcgagcgggcggctgcgggcggcgcggagcgggcggcgcggagcgagcgagcgagagagcggcgcgggccgggccatggggtggcgggcggcgggcgcgctgctgctggcgctgctgctgcacgggcggctgctggcggtgagtgtgcggggcagaggggcggggggcgggggcggaggggctaggggcgccccggtcccgctcgccgcctcccgccaacttggctggggcgcccaaggctgcgcggcggggactctggcccgggacggcggcgcccgccggggaccccgggccggcgccaccctgcggcatggggctaatccaggggggccaccagtcaggacccttcgtggggctgggggcggggctggcccgtgtgggagcccgtgggtctctcggccacgttgccgagtgctggagtctcgctgggcatggtccggcctaccattcctggggaccaggaggggaaactttgagcagggtgggaacttggcaggacgagggaacccttctgcgccagcttggcagaacggccactcagtggtgatggggaccctatgagtctcgctgaaactttaccacaccgtctatcaccttggggagcttggacccaggtaggcacaagcaaaacttttgggacagaactgaagcttgtgtggaacacccacgggccttggagtcatacagccgaagagttgaatcaatccctgcctttcactgagtaactgtgtgacctggggcacgctagttaacctctctgaggccagccccacgtgggtcaagggaactcaaaatgcacggcctcaaaatgcatagctgcagggcgttgctggactgcgtggaatgagctgcaaagtgcgtggtgcggggatgcagtgcacccttgggggacccgagttccccagctttcctcttcccaggtctccaagaggcagggagaggcctgcccttgcagtctagtcccctactctgagcttaggtggaggaaaagggaattctacggtcaggaatcccgaggcttagaaggcacttggccagcagaggccctgaggacctgagtgaacttgaggaggactgggtggggtcggtgggcagggagctagtggcagatgtgggtgggggcacatctggggagccgagcctaccgtggggagccacagagccacccccactctctccgaggtgctcctaggcagtccccatacctgcctccctgttctctgagccaagagagggacttttctaaccaggctggtgtttacccaggaactgcctgcctggcctcaccttcctggcttcatcgcacctctaccctcctgagtcactcgtcaagcccccacccagacctggctcctcactgctcttgccccacccacccagcacttctcctcccccatccccactctgggcagcctcctctgtcgtcctcctgtttcagcctctcaccccaaaatattcagcagggccatccagtagctccctagtcttgacctgaacttgcactcctggcactgacttttacttttcccaacgcaccaacctagcacgtgggatgttttccgaggcccaacagtctttcctgaccttcccccagctctgcccccgatgaggggctcctccatgcccgggtgcggtaggatggcggtgggtggagttgtttgctgtgtgcatgaggaatttccacagacattcctggaccgtggcagatcatctcattcacttgttcattcaacagatcatcactgagcgacattccatggcagtcactgggagtacagaggttcattctttgggcagatatttgccatgcacctactgtgtgccagtgaaccagtgaacctcgtgtggtgctaggggctggggtgggttggaccagcaaggacaggccctgtctgtgccttcccagcactcacaggctggtgggcggtaatttagacaaataaacaggcagctccaatcctgtgggattagagagccttctcagcaacacatggagggtcgctgtcccaccccaggctgctggtggtgggctggaaagagcttggcccctgaagtctctttataaaattctttttaaaaagtttttcaggccaggcgcggtggctcatgcctgtaatcccagcactttgggaggccacggtgggcggatcacgaggtcaggagtttgagaccagcctggccaacatagtgaaaccccatctgtactgaaaatacaaaaattagacgggtgtggtggcgcatgcttgtaatcccaactactcgggaggctgaggcaggagaatcgcttgaacccaggaggcggaggttgcagtgagctgagaccacaccattgcactccagcctgggtgacagagtgagactccgcctcaaaacaaacaaacaataaaaagtttttcggggccaggcgcggtggcacacgccagtaatcccaggactttgggaggccgaggcgagcggatcatgaggtcaggagttcaagatcagcctggccagcatagtgaaaccctgtctctactaaaaatgcaaaaagttagccaggcatggtggcacgtacctgtagtcccagctactccggaggctgaggcaggagaatggcgttaacccgggaggcggagcttgcagtgagccgagatcgcgccactgcactccagcctgggcgacagagcaagactctgtctcaaaaaaaaaaaaagagggcatcacactttgttgcccaggctggtctcaaactcctggcctcaagcgatcctctcgcctcggtctcctaaagtgttgggatgacaggcataagccatcatgcctggcctgtctctgaagtcttacagacccaagtatgagtctctgggctgcggtttctggctgtgtgatctggggcgagttcctctctctgagccttagtttccaaatctgtacaatggggttgaggagtttgttgcaagtcaaaaatgagatcaattcctagcccaggctcccagcacaccttggaccctctttgcctgctacccttgctctcatctgcccttcagtttggtccggagccagtggcttatggggaagggttgggcacagcagcagggtgagatgggccttagggagctccaggcttccccgggacgggggacaggaccacaggaagctgatctgtgattaagtgtgggtgtaatttcagctgttgggaggtgaggaggcttgctggaggagggggctgggcctgggtgactcggcaggccttggcctgctgacccctttagggcggccctgcaggggacaggcgtcttgagggagcctcggtggtgattaaggtgttttccagggcctaggagggaagtcgctgagatacctgtttcctgcctcagctggatttcctcactggggaggctgccagctgaactgcaggagcctccccttcctggcggtccctcagccctcctccacgcagccagctgctctgtcacctgacactagcctacttgttccgtacctgcagccggcacaggatggggttttgagtgtgccctggacattcccggagggaaggagggcaggctgcaggtctgtctgcagggtagaagctggaaggggcagagatggaccacccccccatcccttaggcccatttccccctgtctggggagttgtggcccctgcctggcttggcccgggcctgctctcaggctgagcgcagacaagttaggatctgtgggtctgaagccctgcccgggagacggtggaaagaaggtggcaggaggtgactgggttcagggcccggaagacgggtgagcaaagtggaggggaaggagctcttggggtgccaggctggatgatgacacagtaatacgggtacttcagacttacccagtacccactgtctgctctgagtttctcagtgaatcctcccattcacctgtgtttcctgctcaccacctccctgcggtgctcagaattaggtcccagcccctgacttaatatagcctacgaggccctgcaacacccggcctcctgccacctgctcctctcaaactcctccagctataccagtctttgtttctttttcttttcttttttttttttttgagacagggtctcacactgtcacccaggctggagtgcagtggcacaatcacagctcaccgctgcctcaacctcccacgctcaggtgatcctcccacctcagccccctgagtagctgggactacagacaccctcctctacacctggctaatttttgtattttttatagagacagggttttgccatgttcccccaggcaggtctcgaactcctgggctcaaatgatccacccccttcggcctcccaaagtgctaggattataggcgtgagccactgcacccagccttttcttttctaatgaatataaaaatttaaaacaaatagagatgggatcttgttgtattgcccaggctggtcccaaactctttaactcaagctatcctcccacctcagccttctgaagtgctaggattataggcatgggccacctcgcctgaccaaggctttgtttcttgagcatgtgaaacacactcccaccttagggtctctgcgtctgctgttccttctgcctgggacatttgtccccgtaatatccatatgaccctctccctctttctggtccttaccactcttcccataatggctgtctccttaaactgctttatttttgttctcacaattgtctggcctgtatttgtctgtatttgtttatgtgtttatctgcttcctcctgctcagtttaagttctacgagagcaggacctcatttgtttttgttcactgctgtatgcttagcacctggcaggtagtaagtgcttagtgaatatctttgtcgaatgttttaagctgtagctactagcctgatccccattctctaagcagaggacattgaggcactgagaggttacgtaacttgcccagtgacttacatatccacacactcagagatgctgcaagccaagttttgaatccagacgaagctctcctaatcacgccacgtactgccccatgtgcttgtcgtgggcagtcagtagatattgctacaacttgtcacagatgttgattaagaactctggtcccaagtagtacaggggctacctcaggcaaggaatatcagggattggctcggggacagaagctcttaggttgggtatgcctcagtgtccgtggggtctcctagggacgcctgtgcctggaggggaagcctaggaactctagggtggtcatttttaggtttgttaattcattaatgttctcatcagatatttcctgggactctacaggcagttgaatttatccagggacttttaggcctgagtgggccaggctggccctgcccagtgtgggaggtcaggggcccctgcccctgccatgctgctagtgggggaaggggaagaacaccctcctggttgtcctgtgtggagcctgcgctgtttttttctggctgttccctgggggctcaaggtttagggtgagtctgcagagcttcaagggctgcctggccttggggtgagaggctcaggagggagggcaggagggcctgcccaggctatggaaagatctggagcaatgattcagaggccacttggaggccagaggtgtgggctctgcaccctcagactacttggggtatatgggaagggttcccagccctggcctgttgcccccctccccttcacccaatccagtcccagctatgaggggtcagactggaggaggaagtgaatatgacttggttccccggcagcttcccaagtatctgctgggcctacctctccctgtcccagggcctaccctggcctttttctcctctcgctcctgctcctgccaagaagagggaggctgcgccgagggtcccggccctgctggaatgttgcttccgcctgggccttggcctctttggccctgccaccccctcctgctcccggggccagctgccccagcacccagagctggctgactgaaacccagaagtatgtgtggaactcacttcgcggggagccgccggcctcactgcccagcctggtggcgtcagggctgtgtcaatagcagccttgagaggggtgtggctcgtggctgctggggtggccgggtcgggggtgctgtcatgaaagccctgagaacaaggtggctctttgaggcctgggaatgtgaggcctttgagtcttgctgcccccagaaccactctcccttcccttccatgatgctcatctgtgccaggcctgcaggaacctcagagcatccctggaggcatctgtggcatcctgagatagccttaggaccagctcctagctcctgaccagggcccattccctgagccatgaaggagggtgtcctgttgctctgggttttaggggagtatctggtgcgcaaagccttgcagagtgtgttgaatgaatgaatgaacaaatgatgtatgtgattaagcgttttttaaaattcatttcacaaatatctgtggagcatcttctatgtatctgactgtgttctagatcttttttttttttttgagatggagtcttgatctgttacccaggctagagtgcagtggtatgatctcgccgcactgcaatctctgccccccaggttcaagagattctcctgccttagcctcccaagtagctgggattacaggaacacgccaccacgtccagctaatttttgtatttttagtagagatggagttccaccatgttggccaggttggtcttgaactcctgacctcaagtgatccacccatcttggcctcccaaagcactgggattacaggcgtgagccactgcacccgccctgttctagatcttgaggttaccgcagagaataaaaatgtcagattccttcctctcatgtcacttgcgttatagctagtgcaggaagacagacaataaatgaaatacatcaggtggtgataagtgctcagaagaaaaaataaaacagggaagagggcagtgagtgatgaggcggggtaggtagggtggggtggtaggaaaagcctctgataagataaatttgaactgaaggagacctgaagtaagtgagcgggtgagcctcgcagatatcaatggaaagggcattccaggcagagggcacagctagtgcagaggcccagaggtgggagtgtccttggcatgtctgtggaaaagcaaggaggcccgtggggctggagcagcatcagtgagggggagcatggtggatgcagcaggcaggggggtggcagagggtgatcagcagagctttggccatgggaaggaccttggatttgcgtctgagtgaattgagaagtcactgaaggggcccggtgttccataggattgctttggctgctgtgtggagaggagcacggggagggtccagagcaaaggcaaggaggccgtgacccaggacagacgatgggagctcaagctaggaccacggaggtgggagatggttgaatccccagtacattttgaagatgggtcaccaggatttgctagtgggttggatgtggggcgggacagaaagagaagagtccgggatgcctccacagtctttggcttcagcatcccgaaggatggagctgccactacctgagatgggaaagttccaggaggagtgggcaggaggtggagtccagaattctcagaacagttaatttatttgtgtcttctcttacgatctcttgtttggacaataaaaattcctaaaaaaaaaaaaaaaaaaaccggcaggtgggccaggagtggtggctcacacctgtaatccccacactttgggagaccaaggtaggaggatcacttgagcccaggaggtggaggttgcagtgaaccatgatcttgccactgcgctccagcctgggtgatagaacgcgatcctgtctcttaaaaaaaaaaaagaaaaaagaatggcaagtgatggaggggacagcatgggtgggggttggactggctcacatgcctggcagtcatccccctacccatctccagccaggagctcccccgtccccacccaagctggggcctctgcattggcttatggtgtaggcggaggggatcttgctgagtgttcatttgtggagttgcagactctgccttagaactccacagccggagctcatggcttgtagatttattcttaccccctcatctagagtggaagctgcatgagggcagggacttggctttgttcattgctgtttgcctggtgctaggcagatagtaggtgaacacattaaaacttcaagtgaggctgggcacagtggctcacaacctgtaatcccagcactttgggaggccaaggcgggcggatcacctgaggttgggagttcgagaccagcctgaccaccatggagaaacctcgtctctactgaaaataataataataaaaaaatcagctaagcatggtggcacatgcctgtaatcccagctactcagggaggctgaggcaggagaatcacttgaacccgggaggcggaggttgtggtgagctgagatcgcgccattgcactccagcctgagcaacaagaacaaaactccatctcaaaaaaaaaaaatcaagtgaataaaggatgggcgcggtggctcacgcctgtaatcccagcactttgggaggctgaggtgagcagatacttgaggtcaggagttcgagaccagcctggccaagatggtgaaaccccgtctctactaaaaatacaaaaaagttagccgggtgtggtggtgcatgactgtagtctcagctactcaggaggctgaggtaggagaatcgcttgaacctgggaagcggaggttgcagtgagctgagatcatgccattgcactcaagcctgggcgtcattgcgagactctgtctcaaaactacaaacaaacaaacaaattcaagtgagcaaattaatggctttgaggaagccagcaggccaagaaggcccaggctccttgctgagattggaaaggggcgtgctctggcccctgcacttgggagctgcctgcccagccatgctctctgcagggccccagaagatgtgggacaagctgggatgtccactctgccctttttgacttgtctgtgtcctcattggtctcagagccacttccctgggcactgtggtcaagggaaagatgtgggctcaaaaggccctgccttcaagtcttggcccagccctgactggctctgtgaccttgggcaagttgctttacctctctgagcctcagtcaaatgtgaaatggggaggcctgcttcctggtggttatgaagtaaccaggtggatgcaccttgctcagtgcctggaatgtggcaggtatttgacaatccgtgattgcactaagtctcgttcctgctaaagacaaggccggtggaatatctgaggcagggttcccagggcacagccgggcacgccttctctatgacccaggtcctgtactgggcttgttgaatgaatggctgtgtaaggggattgtccattccctgggcctctttcgcagtctcagagctccgggtgtaactgcctctgatctgtcactgcccctccttcgcctaccgaggccgcagctgtaggacagagtccatccttccaccctgattgctccttcctggactgggagaaggaggggggcacaccccagggtgtggcctgggaaaggctggagtctttggacgccttgtccccttcccagatgtgtgcagttggtgggctctgagcaacaggaggtgtggccaggggctcccatgggtgcagaaaggatgttcgtgcatcctgagggtagtgacagtggggggggtgggggatgtcctgggaccccatcctagccctgtccccccctggcctacactggaggaggcaggaccttgcctggggagctctgggccaacctgcagttggtccttacttggtgggatgtggggctgctcgactctaaatctggctcccgtggcctcagagaaacagcaggactcaggagagagagacacacaggcctggggatctcaccccaccccaccctatgctttgggcttgggctgttgggtagagatgtgtcccccctccccatcaggcgggtcacacctaggtgttttgtaacatttggcctctttccccatctttctcccatcccagtcggtggggaaggggaggcctggctggggcctgagcctggggaggacttcagaggtggcctcgggtcactccacagatgcttctccacgggtggggctgggattcccagctgcctctggccccttcccagcccacctccgggtccctgccaccacctccccactccctgcgcctgcccatggctctctcccaggaagccggctccggcccccacctcctggtcctggcctccccctcctaactaaccccagctgactcaaccctctccttgtttggcgtttccaattttcaaatagttgggaactgggatcatgcctcttcttggatcccttactgggctggatggattgaaattctggcctgataaatcccagccctagtggcctctactctatcattttctttctctctttttttttttttttttttttttttttgagactgagtctcactctgtctcccagcctgaagtgtagtggtgcgatctcggctcactgcaacctctgcctctcggattcaatagcgattcttttgcctcagcctccctggtagcagggattatggattacaggcatgcactaccacgcctggctaatttttgtatttttagtagagacaggctttcaccaggttggccaggctggtctcaaacttctgacctcaggtgatccacatgcctcagcctcccaaagtgctgggattgcaggtgtgagccaccacgcccagcagcctctatcactttcacggctcttcaccctttcctgccttttgccttgctatgacccttaggccagaggaacagaaacccaggagtttcctggggacagaccagtctcttccctgtcctgggacctgcaggttctcctccccagtggcctcagtcacataggtcaccagtcaatgttccctgagtgctgacaccttctcattaaaactgccaccctctttagagccaggcctcccactgggctcttgccaggcattatcgcatataatactcacagcaatcttttgaagttggcattatatctccattttgcagggcaggaaactgaggcatcaggagggggagttgggggccagattctcacttgtaatcccagcactttgggaggcctaggagggcagattgcttgaggctaggagttcgagagcagcctggccaacatggtaaaaccccatctctactgaaaatacaaaaattagccgggcgtggtggctcatgcctgtagtgccagctgcttgggaggctaaggcaggagaattgcttcaacccgggaggcggaggctgcagtgagccaagactgtctcaaaaaaaaaaataaaaataaaaaaatagagggaatggctggcccttcatccatccagtacgtgccacacctgggaatggagcccaggttgtcagactcccaagtcatcattgttttcctcagtgggtcctgttgtgtccagacagaggaagtctgggagggctgtgtggagaaggtgggtccaggctggccttggcagagggttataggaggctgcatgtctgccacatgggctttgccagttcctgcttcacagactcgggtgtctttttaccctttggcttccatttcaacccagtgataatgttccccagagagatggatgtgaccttccctgtgactgagacccctgggaaccctgattcttctcagtcaggtcccaagctccctgtggggcctgcaggttttgccctgttgggagttcagtgagttttgctgagcggggcctgctctgagccagccctgtgtccccctcatactgggggcttgggtgaaatgcaaggcagagaagcacatggctcagctgcgagatgaaatctacatccaggtcccgcgttgtgttgtttcaacagccctgtgcagtggaagcttcaagaatccttccatccatccctctgtccactcatttgttcacatattcagctagtgctgcctgaggacctgctgtgcgcctgacatcgcgctcattgtttgatctgtgttatcaatccccctgtacatctggggttatgcctccatttcccagatgagaagtagctcagagagcagggaatagtcaggcgcagaggaaggtagaggctgccttcagcgtcaccagacctcctggaagaaattggaggcatggtccctactctccggatgccttggatcttgttggagaggcaggactcgtaagctataagtgcccaacacaactcaaagtccagacaatagcagagtgtcaggggaaggaaaagactgattgggcatgagttatctggaaagactttctagaggaaatggggcttaaagagcaagtctgatttggctggtagaggaggaaagcattgtggcaggggtccaggagttgtccccattgtccctggactcacattgtccacattgttgttgcatgtgcaagagcaggaagacactcgcttgctgccagagtcgttaaggttgggaaagaataagaggaagtccccaagatagctgaggtgacattcattgctggtcagaccagggaggcaagaggttaaggcctgggcctccacttggtcaccagtcagctaccatctctcctccccgggcctcagttttcctactcacaagatgggctcctttcttgtttgttggccgtcttccaagcagaagaaagggaccctgagttcttggagaaaactgctcactaccccccaaaagttggtggtgttccattctctggggcctgagggtggtaggcacctcaaggagcccaccatatcaccaatcccatgtcttccttcattgacgctattgattccttcccctgacactgttattttctggactttgagttgtgttgggcacttatagcttacgagtcctgcctctccaacaagatccaaggcatccggagagtagggaccatgcctccaatttcttccaggatgtctggtgacgctggaggcagcttccaccttcctctgcgcctggctattccctgctccatgagctacttctcatctgggaaatggaggcataaccccagctcccaagtgccaggctctgggctagggaagcagatgaaggagatggcccctgtgccctagaccttgaagcctgtcctgtcttcttgtgtagccccagaatctctcctgccgtgctctgtccatgtcagttcacctctgctcttgggtacctgctgctaagctgacatcaggggcattcattgtaaatgtctgtttagaaagtgtgactaggagtcacaagattcctaaactcttacgtgatcccaagccattgaacttctttgagcttaattttccccagaagcaaaatgggaccgttcattcattcggcaaacattctcggagtgacagcggtatgcgaggccttgtgttggatctaaacaccaccgtgggcttatggagcttgtggtctgataggggagagaggctgagtggtgggccagctggtaaaggagtagggagaaggaggctacattcaaggaagacactcgaggactatagcaggatttcagggccaccagacctctgggagatctcttgagtctttgtgacttggtctcagcactcatttgtgagtctgtttcccttgcagtgagcctgtgggaggagaggacctgggagccagctcccctgggtgagggcagggggagggcccacagcagcagagagaagggcaggccgattttatcgtgagtctcagatgagctcatggatgtgcaaaatagcgagggctatttatgttgagtctggttattttattttatttttttttttgagacggagtcttgctctgtcgcccaggctggggtgcaatggcatgatctcggctcactgcagcctccgcttcctggttcaagcgattctcctgcctcagcctcccgagtagctgggattacaggcgcccgccattatgcccagctaatttttgtatttttagtagagatggggtttcaccatgttagtcaggctggtctcgaacttctgacctcaggtgatccgcctcccttggcctcccaaagtgctgggattacaggtgtgagccaccgtgcccggctgagtctggttattttcatttaggagaaatggaagctgccaacagagcccaggtttggggttccctggcattgagtgggttaaatgaagggcgcagtcttggggtgcctgcttttcactttcctccctcttttttccctccccgccttctggggtcggggtgggggcgggatgggggaaacatcagctcaagcctggattcgacttgaggaaatgggaggaaagggttaattaagtcagtctggcttcccacctccctggtaggggtcgaggagggggtactgggatggctagggcaggaatgtgtgataagatcaaagctttcagccggcctgggccccacctctggtttcacctgagcaattgaagggaattctctagctgggaggactgtggcctcctaggcaggggggttttaggcagggccaccttcctccaagaggctccaccttacgttggcttcaggtgcttcctccttccccccacacctccacctcatctcccagaagacccaccttgtgccctgacaggtactagaagccccaggggccacctttacttcatacttcaagtggtggggggatgcaccctctctagcaacaggactctctcctgctccctccactgccctctcatagtttgggtttctaagcccaggacacttggttttagaaagaccaggaggaccctggctaaggagctgaaaggcttcagaccgcccagaaaagagcccagagccgccttgctgtggctgttagctcccgtccatcaattccgcaccgtttcattctgcaggttgcactttgggacagtgtcataggcaggaggcatagccctgaggcctatcctagcttcatcactgattgctgtgtgaccctgggcgggtgagttcgcctctctgagcctcctctgtcaggtgggaatggcaattcctacactgcagggttttggtgaagattagagatcatataaatagcctacagctggaatgggcagttgataaataacgggaactattattttgtgattttatctttcctccttcgagagagcccctggtacttggtcctagataaacctctgggtctcagttctattgtgtcgtccccctgcaaccccacctgccacctcacccccgctatgggaaggccctaagtcccagagtccatcctctcctccaacactcttttcttatgggatcttcataatgttgggaggggagcaaggtgggaaggagtgtgagtgcagggggccgaaggctctgtaaatgctctcagggaccttccctagggatagcaggttgagccttcctggacagctggtggtccaagctttccctctccactgccagaggcctcaccaggccagctgggcttaacagaagtggccccaggacacactcagtagggaggagcggatgctgggggtgccgcagcccgggcttctgcctgctttccacactggctctgcgctggttaatgattactctgagtgagcaggagagcagcagaggggaccctcccagccccttaaccactggttgcacccgaggtatgtcagtagtccggtgttccctgctttaatgtggcagcctgctctggggtatgcggggcagggaagcaggggcttggagtcacatattgacaggtagcttgtgcacctggggtcccggagacagtcttagggcccacagggtctaggtgcaatgtgaactctggtatagtaacaggccctgtggtttggtggcagctgtatgaacagatcctgcaataatacacaaggcaaggaagccgcttctagcacagaaaatcctgcactcctcctctcccaggctcagaccctgcacaggagtcctgatgattagggctttggggcagctgagcttggcttccaacccccaactctgccagttctgggctgtatgaccttgggcaagtcactttacctttctgagtggctgctttcttatctgaaagaagagaatgctaatccctactttgcaatggcagcgagccactgggagggaggtatttagttcacaattaatacctggggaatggcagcaattgttatattactgttatagtttttgttattaggagaaagggaaattgaatcttcgtcttgggtaaccagggtgacaatggccgttggggatgagctggaagatctgcccgggggaggaggcataggcagatcccagacacatgtttgaagagggcatgtaggaaagggctggaaggatgaagagaacaggggcttagcagagatctcagccacgctaggcccacctcagacctctcagcctggattcctccctgggctgggtcctgctgctggcgaagtccaggagtgggggaggagggagaactgttttattttgataacattagggcattttcccctactggcagctgctattttgagagccccggagagcaggggctatggttaaattaggtaatgttgctccaacaggaatgtgtgaagcaggcaggctgaggttgcagagagagtacggtcagttcactccatataacattaaactgcagcctggaaaagagcagcttggaccactttataaggcgatgtggggggaaccactggaagctgctgctagtggagtgaaagtgatggcccagcgcctctttttagggagcctgggcctctgcccggaggcctggctgacccagcaaggagccggtgactggcctgaggggcagagctggggtgtcttcagctccacgcctgtggctgctactcgaggcgggtggggtttagggtggggtgatgcatgagaagggtgacttggcagacttggccttgaatcctgcctctgcctctttctagccttctgtgcttgggcaaacccctcaacctcagtggacctcagtattagcagcagtggaaaaacagttccagccacgcacggtggctcacgcctgtaatcccagcactttgggaggccaaggctggcggatcactcgaggccaggagttcgagaccagcctggccaacatggtgaaacctcatctctgctaaaaatatgaaaattagctgggtgtggtggtgcatgcctgtaatcccagctacctgggaggctgaagcagtagaatcgcttgaacccgggaggcggcagttgcaatgagccaagattgtgccactgcactccagcctgggcaacagagcgagactctgtctcaaaaaagaaaaaacagttccagtcccttaggagaatttcttatagatcaaatcacaagaaacaaaggcatagctcacttttacggagggcctactgtgtgcagtaatccctttatgttcttataactccgaggatggtccaggcactagcagcccgggcctcaactgggagcttgtcagaaatgcagagtttcaggcccccttggacctactgactcagaatctgcacgccgacaagatctccaagtgactcatgtgctcgttaaagctggagaagggctgctttccgtctgctgtctcatttcatcctgaaaaccacccctggagagatgactgccatagaaactccatcaatgctcatactcttcccagattcttcccttcttccctttctttggtccaggtgggggttcagtgaagaatagggtgtcaaagcccctgacaggactgaagaaagttgagagtattacttgcttttgagactttttttttttttttttgagacagggtcttgctctgtcacccaggctggagtgcagtggcacaatcttggctcactgcaacctccgcctcctgagttcaagcgattctcctgcctcagcctcccaagtagctgggattacaggtgcacaccaccacacccagctaatttttgtatttttagtagagacggggtttcaccatgttggccaggctggtctcaaactcccgacctcaagtgatccgccagccttggttgctcaaagtgctgggattacaggcctgagccactgcgcccagcccctttgagacttaatcagactctcttgtttccattcacctgcaggctcggcacagctggacaaaggtcatttccccaaagtcattccatgctgcctgcctttggggaaagatgggggcaggaaagcggttctctactgacatggcctgtagggcgggcagcagcagccactgccctatagatcagaggagagggggaggagcccagtggggaggggaatcagagaggggtggccctggacttagttagggttctcccatctatcactggtacatctgggactgagacggtctaggagcaaatatttggagaacgctgactatgtgcccagccctggggaagtatcctcaatttcccctaattctgtagaccctttattattcagaaataaagctccacaactgttaatacaatttatttagtatgtagcatgtgccacacactatactgagcacttgagttgcattagctctttgatctatttaatttcaccatcacttccctcctctatagaatgagggtggtaataataataccgatcttgtggggctgttgggaagataactcaatgtttgtcaagtatatggcacatagtgttaaataaatatagtaagtacaaataatctcccaataaggcaggtactattattgtcccacccctccttttttttttttttattcccacagagtctcactttgttgcccatgctggagtgcagtggcgccatcttggctcactgcaacctctgccttccaggttcaagtgattctcctgcctcagcctcccaagaagctgggactacaggtgtgcgccaccacaccctgctaatttttgtatttttagtagagacagggttttactatgttggccaggctggtctcgaactcctgacctcaggtgatccgcctgcctcggcctcccaaagtgctgagattacagacgtgagcaactgcacacggcctgttgtcccattttacagaggtacacattgaagttcagtgcagggaagggtctggactcctctgctgggatcacaggaggctcgggaagagccataagaaattgagtcctcaaacttataagccaatattataattcagttcaacatagtaagtatttgtttattatcccctagctgctggacattaggaagtatctaaaggttgaatatatacatatgtttaaaagatgaaaaaaaaaaacttggtgtctgtccccaaggagctttggttccagcaggagagaagagacagtaactcaagtgattataattaagactgaatctctagtgttctgaggtagaaattaagtccacatatttgtagggagaaggatgtctttataggggttccaaaaagtctttagagtggaggtggtgattgagtgggccttgaaggatggatgaatagattagctcgaagggcatgggaacagcattccaagaagagggaaccacatgactaaaggcctagaggcaggcaaatgtgccctgtgttaccctgagtgggtgtcgtccagttcttaggagcctcagggggctgatgggtggagaagtccaagcccagcttttttgccattgaagattctcagtgttcttaaagacatggcttctcgaccaactgggactgttccatccccattctgccctgtcttttatttttatttatttatttatttatttatttatttatttatttatttatttacttttgagacagggtcttgctctgtcacccaggctggaatgcagtggcacgatcatggcccactgcagcctcgacctcctgggctcaagtgatcctcccatctcagcctcccgagtagctgggaccataagcacacaccaccacacttggctgatttttgtatttttcatagagacggggtctcgccatgttgctgagtctggtcccaaacttcttgggctcaagcaatccacctgtctcagcctcccgaagagctaggattacaggcatgtgccaccgcgcccagccattctgccctttcttagtgtgaaaaaatcaaagacctttgtaaacaggcggtcagaacttctggtcagcgtgtgataactggtgtagctgacagaattcaggccaaaagcagacagacttgatatcttgattaacgaggcagccttatcaccacacatgttcgatttccgttagccgtttccagccttgacaataaccatgggtggggagccctgtggcagagccaggcctggttccgattttgcctctgcagcctacagctgtgcagccttggcaaacctcagtttcctcctttgtaaaatggagatagctccatctccagccttggcctaaggatcaatgatggtataatctgcactgtctgatatggtaactgctagtcacacgtgactatttaatgcaaaatttaaaattaaataaagttttaaataaaaattcagtttcttttttttttttttgagatggagtctcgcactgtcgcctgggctggagtgcaatggcgcaatctcggctcactgcaacctctgcctcctgggttcacgcaattctcctgcctcagcctctggagtaacggggattacaggcacacaccaccacactggcaattttttttgtgttatttatttatttatttttattttttttaagacagagtctcgctctgttgcccaggccggagtgcagtgacacaatctcggttcaccgcgagctttgcctccaggattcatgccattctcctgcctcctcctcccgagtatctggcactacaggtgcacgccaccacgcctgactaattgtgtttttgtattactaatagagacagggtttcaccgtgttagccaggatggtctcgatctcctgacctcatgatccacccgcctcggtctcccaaagtgctgggattacaggcgtgagccaccgcacccaaccaaattttttgtatttttagtagagatggagtttcactatgttggccagactggtctccaactcctgacctcatgatctgcccgcctcagcctcccaaagtgctgggattacaggcgtgagtcaccgtgccaggcctttttttttttttcttcttcttcttttcttttttgagatggagtcttgctctgtcacccaggctggcatgcagtggtgtgatctcggcttactgcaacctctgcctcccaggttcaagcaattctccttcctcagcctcccgagtagctgggattacaggcacacaccaccacgcccagctaattttttttatttttagtagagatgtggttttaccatgttggccaggctggtctcgaactcctgacctcaggtgatccgcccacctcggcctcccaaagtgctgggattataggcgtgagccaccatgcccggcaaaaaattcagtttcttgatggtactagcctcatttgaagcgcttagtagctatcttattggatgagtgcaggcacgcaacatttccattgcaccagaaagttctgtcggaagcgctgtgtatgttaagtgctgggtattgctggaaggagttgctgtggtcattatccctggttccctgtcccatattggaaccgttccagctctcattggttcttcttgctgctcctctctctgctgggctcttcctgctttcttctcggcagcctctcactctccctttgcctgaccacacccataatgtgaaaaactccatgacttgccttcatccagctcctctgcccctgttattttcccacgtgctccctgcagcctgtctgcatatctgccctttcagctgctggcatctggaatctccatgtccgggctccgaaattcccactacccattcccagtgggagaaggggaggaggcctcccctggcagtccctagtccccagctcccagcagaggtgccggctgcctgggccccttagcggtgtagagatgatggtttgttgtgacgggggcaccctgcccgctctaacgcgcccgtatcagggcgccaagtgtgctgtttgcacttggctgggcctcacgatctggccgggtgcccgtgagggctggcccgctggcacccttggtaacaaaggtaacaaaggccaatcatggaccctccgcctggtcaggaacataaggagccggtcctgggctgggccctgggggtgagggacgtctgacacccagaaccagagtgcaggacagaggccgtggctgtggctgggctctgggtgctgagtgggacaaggcccaggcaggcataggcaggatgtgagcttttgggggtcaggcaggtggttgctctgggcagttcaggtgggcagggtctgcacctggcattcacacctgcccggggaggagctttggcctgagatgccagagaagctcaaggtcacctcccagcaccatcctttctcctccccttccttttggggaggagaaagtcatctgcgaagtggatggaacaggcatctctagcccatgagtgacaaggacattgaggccctgcaaggagctgcagctggtctgagatcacatggccaatccctggaagaatcagagcttggactcagacacctgcgcttttctacctttctgctcctccccatgggagttgtgaagccagtcgtccctggacacctggctatggagggtcagatcctggccctgccagattctcctccgggggatagagacaattacacctagctctcagggcagtcatgggggttagataaccggcctcctggctgttttccaaaacattctgaggctcctcctgcctctggggtctttatagatgctgctcctggtgcctgggtgctcttcctctaagtatgcacctgacttgctctgtcagcatcaccctccatacccagggaaatagcaaccctcaacaggccactccccgtcccctcaccctgctgtatttccttttcagcactctcaccatttgacatgtatatttggggtattaatttatggtccatcggtctccaagtagacggtcagcaccagcaagggcagagaacattgtgtggctcatagtacctgctcctataatgattactgttttttcccccttctctttctaatacttcccaatacctaatagccactgtttactgggccctctctacacaccagatcctgggctaaatgactcacagcttagcgccacaaatttcacaggttcctgtcacaggctgctgtcacttttgtattagaattgagggcggaaggcactgcagtgccttacccagagccacccagctggcaagcggcagagccatgcctccggctgggttagtcccacccagaactcacactgtactgcctcttgtgttgggtttatgagatcagagccttcatccaaactggggactcagaatccacgtatgatgggattggatggatcagatttgggggtagctctcaatcttttgggggttccccttctagccttctcctccttccctgtgcccagcacacatttcctaggatggctccttccctgggattggtcagttagttacagccgggctcactgccccagaatgacaggtaccctttggctggggggacccagcagctaacctaaggcctgggggttgggcagggagcagagagtgggtccaggttcctggctgtccgtgggctgtctgagggcaggtggacaggatgttccctggggcagcagacattcctggtcgaaggtgacaggcagcggggagatttaccatttccggtaacccgagtccctgggatgtcgcattctctttgccaaggacacggcatccctcccttgccagcccttcctgccatttcctaggctgggcctgtctgactggggcttgaagacaggctggagggaccagctctgggtgccagaggttgagactgagggctctggccctgattagcacccccacaaagacctagcccattgccaccctcccagaggcctcatctgtgtagccccttatcctggcctttgagaatccttgccccaaggagaggaggaggtggcttcgtgaaaggtaaatgaccctttgttaggaaccaagaggctgggtcctggatctgcctctgccaatcgagttgctgggaggctcctctctcttctcacggctgcccaaaagcaccattcttaacactctgtatacataatccagctttttttttttttttgagctagagcctcactctttcgcccaggctggagtgcagtggtgcaatctcagctcactgcaacctccgcctcccgggttcaagtgattctcctgcctcagctccccaggtagctgagattataggcacatgccaccatgctgtgctaatttttatatttttagtggagatgaggtttcaccgtgttggccaggctggtatcaaactcctgatcttaagtaatccgcctgcctcggcctcccaaattgctggggttacagacacaagccactgcgcccagcaataattattaatccaacattatgggggtatgggaggcacaaaaatgaggctcaaagtgataaagttccccagcagccggaagtgtcagagatgggattgaacccaggccctccaagtctggttggttccccataacatgctcacttcccttctttgggatttggtttccccatctgataagtgagggtgttggctaggtgatccctcccagcttggacagtacaggatccaggaatgcattggaaccttttgcaggcaggtttctcttgtgtctcattctccccgggggtctttggagagctcactcacttggtgtgtgagctctggggtggataggactgggagagaaggaagaagtggtacttacacctcgtaagtgcctgatactagcacttaggttgtcctgttgaattctgacggcagccttgtgagggggtcatttttattcccattttacagatgaagacacagaggctcagagaggtcaagtgatttgcccagggccacacagctaggaaactgccaggctaaagtgtccagtcaacagttaacagtggtatggggtggcatgtgcccaacacacatttcctaggatggctttgacttattaataaaatatgatagatatagtagtcatcgcaaaaaactatcaacgtgtctcagagatttgaatacctctgcatccaaacttcacctcccaggctgcctctgacactcagaagtagcccagaaatcctttatttagtggtttcttgatttctgctttggaaaatatggtcagttgtaattatgggtatgtgagagttcagaggagagagagctgcgtgggctggagcgggctggaaaggcttggcaccgaactgggagtggagctgggctggccggcagctgagggggctgagatgggctggggtgggccaagctcacagcctccagggacgtttcctgaagggcctgcagtggggctgtgcaccagggaaattgcaagcctcttcaggactccctccctcccggccctgcacctccccacgggggccctggagcaggccaggctccagttaaggcatgttcagccccagacctttgctccggcctctccacccaggcttcccagggaactgggtaaagggctgtgctatgggacagcgaggccaggcaccctgaggcttgagcagttgacagcatgaggactaagatgaccccagccagcccgcccaccccctccacacccccactccctgcctgctctggggcccttggccctgaggcctcagcagctgtcagcagggaagggtgacagaggagggccagaggtgacttcccagcctgcccattctccccctgcttgggccaggcccagagctctccccagctgttgtcagcagctgtggagctttgttctggggccagctctgggtagccccctcctcccagtacatcttcccaccatccttcacagctgctgcccttggggaggggctggggctagtgtgggagacagagtcacatctttggttcctttgatcctaccaacgacctgaagaagaggaattcatgcccttgtttttatggaagagaaaactgattcagagaggccaagcaacttgcttgaagtcacacagcttagtggctgacttcaggctcctggctccccacccagtgctctccgactgcctttcttcaatgtgcatttggcgcaggatgccaggggcttcagggctcctgggcttgactcccagcttggccatttgcgacctcaggcgagctgcttaaccacctggactggaactcccgttttcttgcttgtgaaataagataatggtaccgacctcttgggactgttgagcaaattaaatcagataattaacatcaggtacttagcataaggcttgatgtgttctttgtgctcaagctgagagctggcaacgttaccatcgagggtattaaccacctgtgtgcctggcattctgggtggttctatggaggctacagacacattctttaaatatttgtatcagtcagtaaatatttatttggcacctactgtgtgccaggtgctagaaaaagggcagcgacaaaacagaccaattcccgttcctgcttatattctgcttcacaaagtggctggagagacactactcatcctaaccatggaagcctctggagtgctttcacacactgggattcacatccatattttgcagatgagaaaactgggacccagagaagatcgatggcagagttgagccaggacccagcttttctgagggtctcaggcagtgctgctgagcacaggaggcagccctgtgggcttcctggaggaggcattttgtgctgaatcttacagggcctcagggcctggcaggggaggtggggaacagtacaggatgcagccaccacagtctgggcaggaacaatttcaggaaggtcttacggagggcaaggccttttgttccccagggaggaggcccagtcagagctttaaataccccgtgcagcccagaatagcccccattgtgttggtctgcagctgggggacccagggaggaaccaacatcgccatggaggatcctgagggggctgattctggcagattctggaggtggggcggggaggtcttcaggcacttccctatatggtgcggtggcatttctgtggaaggcttttctagtctggctcaggcaggaaggcctgctttgtgggaagggtggagcagcagctcaagttctgcgtgagcaacgtgcagctgaggggggagcctggtgggtgggggactcccagggacggctctgtgcctgactgaaggtgcctctttgtgcaccagaggtatgtgtgcattggcccactgggccctcctgtaggtgggcctagcccaggcccttgccagggcctcttggcaccctctcctgctctagctattttgggcactggctgtgttcgggtttggggagtgatgggtaatcctgcctagaccaaggctgctggggtgaggttggtggggtactgactggactgccattccagctccctgaatctttgatcactgtagcctctgcccctggcttcagcttcaaagggtcatggtcagcagactctgaggggatgccagccccactgatgaggcagagaagggtgccagacaagcctgtcccttgggacattccctgctctcagtatcagggatagttgtgctttttctaagcaactggtttgtttttacattgtgagacatggaatctagggactggtcaggtttccttcttcccattggctgctggcaagctcagggccacatgagttgtccctttcctagatctctgggattcagcatgtgctctctgtctgcttgcctcactccaggctccatctgcctgccctgcctgagtttttcttatatttctttagttaatattctcttggctgttaagtgtgcatctttgtaagctgtctgcagcctttttggaacagggcaagaggggaggtataaatgaatgatgaggatgatggtgatgatgaccctttgctcagcgggtctctgcagcctgactccttctggctctgtcctgacattgtttctgtttttgttttttgagatggagtctcactctgtcgcccaggctggagtgcaatggcgccatcttggcccactgcaacctccacctcccgggttcaagcgattctcctgcctcagcctcccaagtagctgggattacaggcatgtgccaccatgcccggctaatttttgtattttttagtagagacggggtttcaccatgttggtcaggctggtctcgaactcctgaccaccagtcccaaagtgctggaattataggcgtgagccaccgcacccagcctgtcctgactttgtaatcccctcctttagccctgttccttttgcaggtgggacacagcctagaattttagaatcctaatgttttagagtgtcagtgctctaaaatatcaaaaccagaggaagctttggggtcgtttaagttgatggctttcaaactcattaagcagtgagacccttattttaatcaaaataacaaagataatcacagcaaacacttttttttttttaacagcccagaggtctttttttttttttaaatacctattatgccgtgaattcatagagaataggttccagcagctcaggctccttcccattggttctcacaaagtgtgctttgctgggtggagcaggctggcgctttagttgaacccaggtacctttctctttggcttctctctttttctgatcattctccttcacgcgtttcaggaagctatctcggctctcagagtgcttaatgtgctcaatacgcacattaattctcttggcaagaatcttgcccttaacttgtttgtttacaacaatgctagcagcatactggataacattgtagactcttccagttttgccatggtaacacttgtggggcgttcctttttgaacagtacccattcccttgatgtctacaatatcacctttcttatagattcgcatatacgtggccaaaggaacaactccatgttttctaaaaggcctggagaacatctattgggtgcctctcctctttccctttgtgttcgtcattttggcgaattactggaagatggcggttccggccgaaaggcagcaaacacttatagaacattcaccatgtgctgtgttatctgtagcattttacatctgtatttaaccctcacaacagccgtatgagatagatattattactatgaatgatcgtgcccattttacacatgaggaaacggaggcacagagaggagaaatgacttgctcatggcctcacagctaaccaagggctgaaccagatatttatgtaggtgagaatatagaaaggaaagaggtggatttgtagccgggcacagtggctcatgcctgtaatcccagcactttaggaggccgaggcaggaggatcgcttgaaaccaggagttcgagaccagcctgggcaacatagcgagacctcatctctacaaaaaataaattagccagatgtagtgatgtacacctatactcccagctacttggaaggctgaggcaggaggatatcttgagcctaggaggctctgaggaggcccactgccctccagcctgggcgacagagcagaaccctgttaaaaaaaaattggatgtgttttgatgaaagtgagtgtttgggaaggggcccaaactctaacggtgccccgcttccacctcactcctgtccagagtggccctgaggctgctgaggatggactggagagccatgacctagggctgcttcatcatcggacagaggggagtctgaggcccagagaagggaagggaccagcgagcagagctggttgggagccctgttctcagtcgctgccctgaagagcaccagcacccccttacctgcatggtcgccggccctgggagtgagcccctgccccggtctctgcactcagcagctgaacgaagctctctttctctctggggcacaggtacctccagactttctggagggtccaagcggaccaggaatgactgggtgctgggccaccttctctttcacctccgacaggagtcaccccctgagagagcagactgatggccagggagggaaggctcaggctgtgtctggatttctcaggtgacaggtgtcaatcaccctgaggagagagaacacacccctcctactaccagctagccggccgccagcccgcttttccttccatggggccttgcggcttttcttatcttcaagagcctcctttacagagcccctgggtactggggagcatatcttacgtctaaaatcttacttaaggctaacttgagggaaaggcgggatggttggggtggtgttcccaaagtgtgttctgtggaaccctagtctagtgagccttgcatacataaaaggttccaagttaagcaacttgggaaacaccaaatagttgcacgtgacccccccccaccccccagtcccatcatgttgcttcagtcatttaggacttagggaggcagctcagctttgtgtaaccagcctttcccagatgtgtttgtctcccccgcgcctattcccatccgagagtttctgtgtccaggaaaggacatgaagaaagcagacatggggcgcttcaggacgaggaccccttgctctgatttccagctctgctctccacaggcctatctcagccatgggcctggccctgcctgccccttcctcttcttccttacagcagatgaggaaagcccagcctgggggcagggggagccgacctccttggccacagctgccgggctgttccagcctgttttttcctgttgccgatgcccacgggaacaagcgctgagtacagtcactgaggcctggctgtctggctgtgttgcgcaaggccctggagccagagttctggcccctgctcgcctccgaggcccccacccacccctccgggatgctcttcagtgactatgggcagcctcttgtcaccccagagatgggcttcccagcaggaaagtcccaggcatcatcggcgggaccaggtggtatggagttccttccaggtgtggagccaggggtcttaggttcaagtcttggttcttccaaccctgtgactatgggcaagttagctctctgagcctcaggctcctcacttataaaccccattaattaattaactaattaattgtttttagagacagggtctcactcttttatccggactggagtacagtggtgcaatcatagctcactgcagcctcgagctcctggctcaagcagtcctcctgcctcagcctcctaagtagctgggactacaggtgtgcaccaccacaacgggctgatttttaatttttttgtagagacagagtctcactatgttgtccaggctggtcttgaacgcctggcctcaagtaatcctcctgtctcagccttcattaattaattcaacaatttatttttttagatggattttcactcttattgcccaggctggagtgcaatggcacagtcttggctcactgcaacctctgcctcctgggttcaagtgattctcctgcctcagcctcccaagtagctgggattacaggcgcctgccaccacaccaggctaagttttgtatttttagtagagatggggtttcaccatgttggccaggctgctctcgaactcctgacctcaggtgatccacccgcctcggcctcccaatgtgctgggattataggcgtgaggcaccgaccatgcgcggctgaaaggtgacattggagcaaaaactggaagaagtggagcgagtgatggaatatgtggggacagtgtcccaggcagggggcttggtgtgtttgacgactattgagaggatgcatgtggctattttagaaggcagggagttgggggagcacagtagcaaaagaggttggagcgtggcgtgtgtgtgtgtgtgtgtgggtgtgtgtgggtgggtgtgtgtgtagacagattacatagaacctggttgaccatgattgtgtgtgtgtgtgtgtgtgtgtgtgtgtgtgggtgggtggtgggtgtgtgtgtagacagattacatagaacctggttggccatgataagggcttttcctctcacccgttggtgagtcaggagtcgtgggaaggcctaacccgacaggttcaggaagcggccgtggttgttagtggtgtctcatggcaacataactttgtggaacattccgcccatccttccatagtcctggcactgtgcaaggggcatcattcatgaaatctgtgggcagtgacccaggagggtatgggcaggcccaaccaggttggtgtgcccttgaagccccacagacctgccagggcagcagggcagctgggagccggagaacctgagaaccaagccaggctgcatgcaggaggctggcacgtgaacgctgcaggtgttgccggcagccgtggtgcctggcagatagtgttcgacccccagggaccttcttgctgggcagcccagtccagaagctgttcccgcttaggccacccccaccgccttggccacacctggcacatgggtgaggcaagggcatttcccggtggcttcctggttccctgtaagctggcaggcagctcattcagccaccaggggagacctaatcttggggtgtctgtgggggacggaggagagtgcagggactctgggggtacaggggagacttggcctctgtgactagcaccgggtcagcagcacaactgaggggcggcccttttaaatggaaaagcccactcgtgccgccctttgactcctctgccactcacacgcgtgtcccgctgcaccaggcttcctcccaccccgcgaacgtgccgtgccctctccagccctggcctcagcgtgtgcccttccctccacctggtccgcactcttccccttctctgctttgcttaggtgaagtcatctctcaggcccagctgagttagcatttcttctggaaatcttccccagcctcccagccacctccctaagtgaggggaccctcccctgggctctgccggcccccttccttccccttcagcactctcttcgcacggtgttgccagcacgtggttccgtggcctgtgtcccccaggaacatggagttctgtgtccatttcacattttgtcccccgggcccagcacatagtaggtaccccgtaagtcgaggttgaagtgacttgaattgaaccaaatgggacagatctgatcgattctactttttttaaggatgaggaagctgaagccccctagctagaatatggccagggtggcccggacttggaggtgtctgacagcacagcctgctctgccccaccggctggtggtcaagtgttctcgccagtcccctgcctggtcagtgccagaccgggttgggtgcccacccctagctatgtcataggagcctccaaggcagagaccacatggggcctgcctggagaagggccaggcagattcagagattgggactgtgcctctcaaagagatcaccgcctcattccacatgcctctcccagtagccccaggaaggaggcaaagcggggacctttttttgcttccattttatttatttttattttattttatttatttattttttgagatggagttttgctcttgttgaccaggctggagtgcagtggcgcaatcttggctcactgcaacctctgcctcctgggttaaacgattctcctgcctcagcctccagggtagctgggattacaggcgcacgccaccacgcccagataatttttgtatttttagtagagatggggtttcaccatgttggccaggctagtctcgaactcctgacctcaggtgatccgcctgcctctgcctcccaaagtgcggggactacaggcgtgagccaccatgcccggccttttgctcccatttcatagcggagagaactaattcttggagggattgttctgcagggacaggggtgtcttggaacggatttcagggcccgtgtgacctagtcccctctttcccttaggatgaagtgttatggcctctgtcgtattaatgggaactgaggactagaggtaattctggcactttcaagctgtgtaatcttgggcaagtctccttctgaagttagctttcttctgtcaggtgggttaatttccacctcagggctgttgggcaggttcattcatttggtttgtccgtgagtccgcagatttattagtacctactgtgtgttttctgttgtggagttgcagcaatgctcaaaacagatcaaagtcactgccttccacgtgttgttcacatggactgagatggtgggtgtggatgcccagtgcatacagtagagactcactaaagttagctaaaaggtaaaggaggcaggggcttgtccaaggcaacgtggtgagtgcggggctaagctgggactagaaactccagaccccagcttcctgccctctgggcctccgctgaaggccctgacctgccccagcgctcccgagaagccctggatggaatgcagcttttccaggttgcaggccttgatatgagcttacagagggcaaggggtcagaggtcagaagcagggccctgctggcagctgtgcctctgagctagccaaatacagaagcatgaacccagcagaggggagtcctggtttcagactccgttcccattgcctttgctgtgtgacctggagcaggtaactgtacctctctgagcctggtttccttatctatcaaatgagtgtgcctccagtgtctccctcgtgaggttgtggtggatctgagtgacgtaagtcttgtgaagaccttagctcagcccctggcacaaagaagccctggatgcgtgttggaccctctccttgtttgggggcgtccgtatttctcctggctgactggctggtgaagttcctgccaccttgggggcccctgtgtgagaagctggcaggcctcccgagtggcacgggcagcacaagcatgccagaggaggctgtggccacctcccttccggcccggcgcccctctcagactgccaggggattaaaggccttttggcctttgtgtcgggctctgagcccctggcagtttgtacaacaaagtgctgccccgacagattccttcctgtgtgctgtctgtcgcctgtggacagggcactgggtggcctgggggtggggcagggcaccttgatcctgtgtctggggcctgggttgcagccgagtaggggaagcacttgttttggggttacctaggagcctgcatcctggcagagggggatggggaccttgtctgggttcatgtccctccccagagatttggggaccatgggtcacattgtctgctggttccttggcagtgggcaggggaaggggcactgaggcagagcctgtggtgaccgtggcagggaggcaggtgggcaggcaggagctcttttgtccccccgcccctgcactgtctctggattttgatggggtgagctcactccatccccacatgcctggagcctggccctgggcagctgcagccgccctggggactgtgcagtgctcagaccttcctgcctagctgcgggggcagtcgggggctcagtcccaggcttgggctacaaggagggtggggtggactggctgctgaaggcatgtgaacaatgtgtctggagaagcccaaagccctgggttggtcccagagtcagcctctgagcaggcagacaactttgagccataggacccaattctattgcccaccccttgctagggtcctgcccactcagccaggctcctcccttcatcccagatctggaggcgaccccaggcctgagcccacacctcacactccgcatgcatcacccctcaaccacacctacccctcacccctaccatgcaccctctgcatgatactaatcctaatgcttattaagcacttactgtataagtaattctagtgcttattaagcacttactgtataagtaaacgcctcactaagtgccttacctgcttgatcccatttacccagccgattctctctgagcctcagtttcttcatccagaaaacggaaataataataacacaagctcacagtttcttgaccgaaagcctcagagtcagatgtgttctggaattcagaatttttcaagtttgagaaggtgacatagagcatgtgcccagccggcatgtgacatccccattggagtctgggggtcacaccccatgatcaaacaacggtaatattgctacagtgaaacacaggactcttccctctgagtggagtgaacacactctgaatagcttcatgtcggttcagttcagggcttggcacccaatgagcttgctataaacttttttttttaacagagtcttgctctgtcgcccaggctggagtacagtggtgcaatctcggttcactgcaacctccgcctcctgggttcaagcaattctcctacctcagcctcccgagtagttgggactataggcatgcaccaccgcgctgggctaatttttgtatttttagtagagatggggtttcaccctgtaggccaggctggtctcgaacttctggcctcaagtgatctgtacctgctctccgtatctgtacctctccctccttctctccattctgtgccccactcctgtagttttctcctccgttcttagtcctttcctaggcagccttgtctgcctctttatcctcacccaggccaggagaggaggatccagcctgcattcattgtccctaatgacacaacttggacctggagttccatgtgaccctcgttctcaccaggagggcctggacatagcccacctctgggattgggtgcctcccagaagccctcgcccacagtcctgccagtgttcaaggaatgcctgcccactgggggtcaccctgcctgcatcccagccccaagcaattgttctcagcctgttagaacaattctctggcctgggcccggttgagtcagctgcctgcacaccgccaaaccaggaactgcagggtctggaaaatccccctctctgcttagctccttcctctctggccgaggtctgacccctagacccctcctctccagctgcccgtctggctccaacacatgcctgaagtgctgggttcctctgggaggaagccgggctccctcaccgccggagacgggctggagggcaggaaacctgggttctatttctgaccttggagctgctaatggccctccttgggacctgaggcacatgctgcacagtcccaggccactgccagctcaggcatcccatggggccattctgagagctggtcaggttggggacagggactggccaaccctgggctccctggtattgctctctgcttaggcctcatggccagcccagaggtccagccctgcctcatttcctggtgagcagaaggcttggggtgggatgccagctcctcacctgtggtctgggcagacacgtctcccggggctcactggggaaggggagcattcatacctcctcagcctcctccaagggtcactgtcaactcaggtgatactaggctgaggaaatgcattgcaaagtggcatgcagtgtggctgagaggctttgcaagagtgactcccagtgatctcatatctgcttcattgcatacccctggtcacagaggtgatatagcacagtggtagctgcttaggtattggagcccgaccaccagggttcaaatctcagccctgccacatgccagtttccacgggtaacctgactttctctgctctctttgccccctttctcagtggagccccataagacctataacctggtttaggagtgcctggtgcatagtaagtgctcaataaatgttagctgttattattcttcaagcagatcctggtctttccctttctgggtccaaggtccttctatggtcaagtcccaagttccttttggctctttctgggagcctctttcctgtctggttccatctgctctcccagatgtgaaatacagagctcctggaaccttttgatcttcagctttttacaaatgaagtctctgctcttgctgacttattccttgctatgggcccttatctgaccctggatcctcagaccctagggtgggggctgcaagcaacagcagactggcagatggagggacccgtgctctggagtcctctggtggagtgtggggcacttctgtccaagtcccgacgtgctctggcctctctttcccctctccctgcagatgtgtgttcctggctttctttccatgttgaatctcactttgctatttcctgtctggtcccaaggccacccccgccgccacccgctgaccagctccctgctccctgggaaaagctctggaccttgctcatcattcaccgctaggttttcctttccagacggcagtgtctaggagatgctgggagtcgcagtgctccaggcatgccctccataaccttggttgcaatgagagggggattggcattgacagagccccccaccaggttgaggggacccctcaaatctcctctaaccagagtcagtgcccctgcaccagccccagcctcatacccacgttgggtcagtcaggcctgctccagccagtgggaacactgccctttaccccacccagggaaggaggcagagcgcctggtaggggctggtcttacggttctaaccagggactgtgggaatcccctggacatgcacaactaagaccaccctcctgggatggaaaaacctgactcactgtctctgagaaggagcccaggaatctgcatttctcaccagctcctggacgttctaaagcacactcctgaatgcgcatcccacgggcacagcctagaagtccacaggccagcactcaggaggacagggagagggcagggagaggagaaggaacaggaggcaacatttgccgctggattgttgggggtaagggctttaggccaaagcaggaataagatgtggacaactcagaccttccccaaggtctgagagcaccgcaaacacaaagatgaacaaatggcacccagccactcccccatccagggagctcacagcctaggacaggagatgcttatagattgcacagaggtaggtagtgcctccccaaagcaagtcatcttcacagagtgactggaattcataggtgatgaattccgtttttgtccgttcatttattcattcattcaagtatttattgagcacagggtgcagaaaaggtggagatgaattcatcacagcccttgccttcaaggtgcttccattccaacggaggtacagacaataaccttgtgagcccagaaccagactggggttgaggtcactgtgaacagcaaggagtcgggacaaagagagtttctttctagtcatccttatttaggcataaatacacacaacaaaatatacccattttcagggtacagtcagtaatgagatatgtatgcccagggaaccatcaccccagaagtgtctcttgtgcccccttcccagtcacccccagcctgcccttggtcccaagtgactactgatctttctgtcactatggattagactttcacccctaagggttcatataaatggaatcgtatagtttgtagtcttgtgtgtctggcttctttcagatccacacctatcaatcagtggtttgatcctccttattcctgagtaggtggaggaggtggtatttaagttgattttggaggatgcattggagttcgcctgagaaacaaagagaggaagggcattccagcagagggcccggcgtgagagatatggactgtgggagcagtaggggtggggagggaagggggcctggctggctctttgtttttttctcctccttggcctttgctctggcttggacctcactaccttgtctagcccttgtgggtttggttttcaaaagcgagaccatttccttctggcttaaggccagggcagggcctgaggccctcatgccaggccattgccagtctgtgcatacttgtgcttgtggaatctggggtccagccatcgtgaatctgcacacttgagggccacggggttcccttgggctcccctgggtttgttttcctctaagttatttggtaaaactgctttggaatcatccggatcttgtctagggggaagaggcactcattgcccggacccacacctgagaaggcaggtgttatggctgctggggcccttctgctccggcccacatagtttgcaggccccaaggtggagcttatcctgggctcggcagcagcctgaggtcacgtggagttgacaccacgcctgtccccattcagcccagatactgagctctgcctccgcgctgctgggcccagggatgagcctgtcagtgtggctgcatgtgccaaagctaattctccaacacagtggaatgtgttccctgcagcctggagacgggcaggccagagtgaggcaggaagaggagccaaatggcctggggaggagctgcctggggaggcaacggctttgagcagctcgcccttgacttctgcctgtgtccccacccatgctgaccctggccagccttccacctgcctgtgccccccatctgcgctgcccgaggccacccctttacccgcccgcatccccccatccactcactcatgtcctgggtgtcccttgccttctccaaaggaaaaggagtctttacttaccaaagtgatttacattttattgtctgctttatttgaggattcattcggaaatagcagggttgggctctgaagcctccaggggctaatgggacttggggaaactgaatcaaaagggttcagccccagcctggctcactgagccatactaagtcaaatttaaccactaaggggcctgaaggtgggattctgggtccccctggaagtgaggggaaggaccgtggggctcagtgggagctggagagagtgactcaatcagctctcgtttgcttacaggtgacccatgggctgagggcatacgatggcttgtctctgcctgaggacatagagaccgtcacagcaagccaaatgcgctggacacattcgtacctttctgatgatgaggacatgctggctgacagcatctcaggaggtgagccaaggatccaaggctgggagcagaggggtggggggtgagactgtgcttcttcccactggcatgggggaggagggtgaccgaccattccgagctttctcaaccctgtcccactgtatactaggtgcccagaacagtgcctgacacccagtaggtactcaacaaatacttgttgttgctgattacatctcttttttgcttatagacgacctgggcagtggggacctgggcagcggggacttccagatgggtaagttgctgcaggcctcctgcaggtctccctcctgtcccccagggaagccccagagccagtctcctgggctgagggctccttgggcctgccctggggtacaaagcaagaagaagtgggtgtgatctcttaacctgctgagtgacagttgtgcagactgattggcaggtccctgcaaggctggtgtggccaggtcctgtgcttgcccatgccacaggcacaggtatcagggcactgggcaggtaaagcccagttctgctggggactgacagccagtcagctgtttcacattcaaagcaaagttctcacctcccagggcagctcagctgttgagtccttccccagagccctcctgggggcacagagctggggatcccaggcaaagacaagtggaacagaggggctctgtggaatcgggcattcaggcaggcagcagggcatgcagagcacagatcgagcctgacgctaggcttgggagagaaccttgccttaaggtgggtcatcggctgggaagcaagggttcctagcttagggaggcaaggctaggctcttggagggaggagagtcagcccccaccctggtcagactggcccagcactgggatggggacttatagtccctgcttccttccactctgggatactgggtggagaaggacctaccccaggacaaggccctgtggctctttatggttcctactgccctctctgggaggcagctcctgggacaatctgtgaccagggccaaggatggagcaggtgctcaggtcagaccaactactgggccatcccgtggcatccagggctgccttcaccctaggcaggccttggccaaatctggcctgggcctacttcaggggtggagtcacctccctttagctgacatatccggggccttcaaatgccagtgggtagcatcctaactgggtcagtgtagacaggagggtaggtcactgggtaacctggtcctgactgtgacctcccagagcctggacttggggctctgcctgaaggttttccatttccatgtgtaggtctccacgaggctgcaggatgcctgggagctgggtggggcttgggagagggagtgtcaggtgggccccaggcacacatggcacgtcccgtcctggaatggcctatgctaatgtgtccctggagctgcctctggccaagccaggcttgcctctgagatcaccctgtccattcatgaaccatctccagcccctccccgggggctgcccactgcagcagctctgccccagctgggcagtcctggccagcccacctgcccttcctgagaagcagctgtgagggcagacgaggccagagggggaagaggtggggaacagggcacagcagctgtagggggcccaagaccagggtaggtgcctttcctcgcaagtgggaacaggtggggcctcagaccctccaggccaaaccctggctcctgccagctgcccttggggcaggtccaggcagctgggctgaatgccagtcagggaggcagcaggtgtgcctccctgatcctggggtcccagggtgcccactcagacttgaccaagggcagtgcccccactgcgcccatgagccagagccatcctgcctgtcatggggccatgcctagcctctggcccagtcccagaccctggactccagcccctgagatggctcttcccctcctccccctgggcatggctgtggctccctggctcagctccagccccctgtgtgtcaagacccgtccctgatagcctcccctccctaggaccccttcccacgtctcctcccccagtttctttccatgttctgacctgtctctttctgtcttcccccatgcccgtgtgtcctgctctgacccttgtcggcatgtctgtgtgtgtcccctgtcctccctgccctgggccctcttccccactccttgagtgtctgtctctgcgcctcctccctctgcctcatcctgttcttctccctctctctggctcaccatctctgcttctgtcgccctctgtctttccctctctcccctctgcctgttcttttttttttttctttttccctctgcctttttcttcacctttgtcttaccttttctctctcattctcccccgccccactttctttatctctgtctctgtctttctgtctctttgtgtctccctctctcttgcaatgtctctgcctctctctctgcttctctccatctcgtctccctcgctgtcaatgtcccttcttgcctccttctctgtctctactctgcaggctcagggcagcccctgggccgcccgcccgtggctggcatgatggtctcggagcctgatgaggagtcccctctcagtaagtgacccaggccctggccaggtgggagcgctgctctccctctgcctccctccccatcctctctccccactcttccttttctctcctttctccctgttctcttcctccccaacctgcactttgctgcgagtcacacaagaggctcagaggcacctccctgcagagtccaggggctaggccagccactgcccctgcccaggacacagccaggcccaccctgggcccacagatctaaacacagtgggctggaaccctggcgggcgttcttccccatggggtgttgacgggcagagatgggtgcagcagccctgcagggaccaggccctgcattccagaggccacttgtgtccaccccagcacaggccaatcctgggcccacccgagggacccacagggacccagggctggagttcgggggcctgggtgtgttgcagagagttctgttgagcagggatgggaatcaggagttggtgagtagcctgctccggggccagggctagtcaggtgtgcagcccccacttctaccctgagtgcagggcagctgtctccctctcccggcctctggctccaagggaactcaccagatagggtgagaggagggagaggactggccagagagcacccctattccaaggcagcctcgcccctgctggctgcaccagtgtccttggctctggaggctggttcttttttccttttcttttcttttttttttttttttttgagatggagtctcactctgtcacccaggctggaaggcagtacagtggcacaatctcggctcactgcaacctctgcctccctgattcaagcaatcctcctgcctcagcctcccgagtagctgggattacaggcatgcactaccacgcctggttaatttttgtattttcaccatgttggccagcctggtcttgaactcctgacctcaagtgatctgccggcctcggcctcccaaagtgctgggattacaggcgtgagccactgcacccagcccgggggctggttcttgaaatagaggtggcctcaccttctgccccagtgctcaggcaccagctgcagggtgggagatgggaggtgttcacccagacctgcccttggtctcgaagaacgaagcggggtggggtcaggctgaagggcctgtgcccttcccaggccctagtagaaaggggctttgtggagctccagtccccttccccaggagcgggcacattcctgggcagaggcccggcctcctcgcccgcgctgggccgtggggctgaggccaggggcttgggtggggggactctcaatgggcctctgtgctggctcacaaggggcctctgtggctgagccatggcccccacactccagcccacagagccccgcccacccggcacccaggagcctagcccagcggttcagggcaggcagcgccagggctttcttcacctgagccacagagcaagaatgtcctgtgcacctgcgggcctgatggacagagtaaagcgggaggaggatgggcctggcagtagcacagacagtgccactccctgctctgccacctacacaccggatttcagatttttggattagggatgcttggcttgtatatgactcatttgtcactcttattcattcatatctatcacatacatgaattcacaaatattgtgaaacgtaatgagcataaaatgtctcatatatagtcggtgcttaagaaacgatagatgtactttgggaggccaaagtgagaggattgcttgagcccaggagtttgagaccagcctgggcaacatagcaagaccccatctctatcaaaagtcaaaacattagctgggcatggtggcatgcacctgtaatcccagctactcaggaggctgcagtgggaggatagcttgagccttagagtttgaggctgcagtgagctgtgattttgctaccgcactccagcgtgggtgacagagcaagaccctgcctaaaaaaaaaagaaacaacagatgcatgtgtatgttcacaccagtctgagatgaatttattcagccatcactttcaaggaacccgctgtgtaccaggcacgcggcaggcactggggatgcgggcgtgaatgaaatcccaggttcccctccatcaagcctagagtctggtggtggagagaggaccacagcagcttcgattcttgggcggtttgctgtgtgccaggtgatgcatctgagtacaagggcctggtgcatgtgagcacaatgtcatgcactcctcgcagcaacccaggtggtacatgcagtcaatatccccattaggaaacagaaactcagagccgaggtcagtgcctgaggcatggctgaccttagaactcacaattgttactgtgatgtgaaacctggcagaatctatgcagtacacggtggaaggtgctctgctagggaaagcagggcactgtgggagcccaggggagcggtctctaccccagccagggcagatcaggaagatcaggagacaatggctgagccaagtcctgaggaatgagtaggaactgaccgaggaaggctggcagagcctttcccagtcacacgcaggtaatccctgtgccaggccaactccctctgggagccaccccttcttgtccagccttcctctgaactgtgggggtctcctcttttgcactagcacttggtttctggatcaggccatttcccctgttagttaaagcccctcagtcaagttggggccttggcattgacccctgagcatgtatacctacaggcagtcctgggtgtagcagtgggcacacaggtgtcagcctcgagggaggcctctgggggccatccccccaactctgcctgaatggtccaactgcctaaggccactagatgccaggctggggctctcaaaatgatcctccttcgattttccagtttatttccgagccctggtgaatttcactcgctccatcgagtacagccctcagctggaggatgcaggctccagagagttccgagaggtgtccgaggctgtggtagacacggtgaggtgaagggggtttgggaagctcgcgggtgtggcggggcaggaccgaggatggggtgaaggcctctggggctgatggcactgtgtccctccccagctggagtcggagtacttgaaaattcccggagaccaggttgtcagtgtggtgttcatcaagtgagaaggggctccctgggggctgctgggggacttgagcgggtaacctggagggggctgatgaggatgggaaggaagcctggcaccgcggaaaggcctatgggatgagtcgctgtgggtggaaattcaggaattggtcgggggatcattgggacctttagttgcccttctttgggtacaggctgtcccggaacagggcctgagcgtcggggcgggagcctcatggaggagctgagaacacaggtgtctcgctgaccctcctctcctgcctgtctccatccccagggagctggatggctgggtttttgtggagctggatgtgggctcggaagggaatgcggatggggctcagattcaggagatgctgctcagggtcatctccagcggctctgtggcctcctacgtcacctctccccagggattccagttccgacgcctgggcacaggtgagcctatcctggtgtctgggatcgcctcctccagactcgtggggtcccctttcagtgtctctgccataggctcccaacttgggcttgcacaccactagaaacagggagctcactactcctgagtctgccccatcgatctttacacaatcttggcttggtagagcacagactgtttcctctagcacatacccgttagacccgagttctgctccttccttctagacctctgcacattgacaataggtaatcaggcctttatttatcctgtacttccaagtccaaaacacattagtacttaataataatgagcaactgtttactgagcactgactgcctttatttccagcctccgggtcagtcttcacagcaattcctatgaaggagatgttattcctcctgtttcagagacgagggaactgaggcccagaaaggaaaatctaaatttgtccagaatcagatgggcagatagtgaaaaggcgaggatttcaaacaaactcggtgtctgtgacagtcttgccagaacctgtgatgacagaagcaggagaaactgaggcacagagagactaggaaactggtccaaagccacacagcggttaggtgcagaatcctggcctttgtactctgggtcagcccagatttccttctactgtgcctttggtctcctgttttaacctcctgagtctcttttttttctctagaccgaacagccctagttcatccttcacaggtgtggttctcggccctgtctccatctcagttccctgtctctgggaagaccctgactcagtggaactcagaatggaacaaactccatcccctactatggtgtagcccaattaggaaaagacagtgaaaccatcacctcccttgttccgcacctcaattaaagccaagcgtggtggtgcgcgcctgtagtcctagctactcaggaggctgaggcaggaggatcaccggagcccaggagtttgaggctgcagtgagctaggatcatgccactgcactccagcctgggcgacagagcaaaaccctgcctctaaaacaagacaaacaaacaaaaacccttaattattgcacccagagatcaagcttgctcttctgcatcatcaggcccaggtctaaagactgctgggggtccagccctcctctctcacttttcaataagtcctcctggctagggatggtggaatgtggcccagccctgcagccctcagctcccggctcccaggtggaacagccactgatcacatcttcctttccagcacagacccccccacccccgccggccgctgtggcggtcgcagtgacaccaggtgagagtgtaagccaggccgaggcccagccaggttcctagagaagttaaggttggagaggaggccgggtgcaggggctcacgcctgtaaccccagcactttgggaggccaagacgggaggattgcttgaggcaaagagttcgagaccagcttgggcaacgtagcaagaccctgtctctaaaaaaataaaaaagaagagagaaaaaaattttttaaaggatggagaggaaagaagggtgtgggcaagatggctggctgggcacagcccaagacagctgggcactcccttctcccctccttctttgtcctcactgggccaggctgtggcctgcatgtgtgtggtgtggtggttgcatgcgtgtggcatgtcaactgtgtgtggggtctgttttagagatgggggaggccactgccgcatgtcccatgccccacgtgtgctgtggatgtgtctagtgtgtgctgcttgccctcgttgtgcctgccagaaaccgagctgcctgacacagggccctggagcccactccagccacacagcacctacagcttcccgcacctgcctcctgccgcctctgactccagtctgcttcctttccacctgcagtgccccagttcccaagagcctgcacggaggccgagtttgcctgccacagctacaatgagtgtgtggccctggagtatcgctgtgaccggcggcccgactgcagggacatgtctgatgagctcaattgtggtgaggggatgtccggggccacgagtggtttgggtgccaggggagggccagggtcctacacctgggtcttggagcccatcaaggactatgagggtttggtgcaggcagaggatgggggcataggaagggtgatgacagagccaggcagggggtggcagggagtggtgttggggagtacagggtgggcctggggagggttggggacaaggagcaggtgaggagccatctgcttctgccaaatgccaagcggaatctatccacagaggagccagtcctgggtatcagccccacattctctctccttgtggagacgacatctttaccgccccggccagagacaaccatcatgcgacagccaccagtcacccacgctcctcagcccctgcttcccggttccgtcaggcccctgccctgtgggccccaggaggccgcatgccgcaatgggcactgcatccccagagactacctctgcgacggacaggaggactgcgaggacggcagcgatgagctagactgtggtgcgcaccggcaggggtgcaggtgggtgcggggagcaggaagctggcccgggaggatgctgctgacccctgcccggtctcctaggccccccgccaccctgtgagcccaacgagttcccctgcgggaatggacattgtgccctcaagctgtggcgctgcgatggtgactttgactgtgaggaccgaactgatgaagccaactgccgtgagtatccgagggtccagctgaggcccccttgccctgcccaggccgcttgctcctgccccgccttccactcctgccccgcccctaccctgcccctccgctttcccccctccccagtcccccaagcctgtttgtttgctctccctggctgagtgcggaaggccctggagacacaccccaaggtttatctctaaccagagccgtaaggccccttggccctgagctggcctttggtgaagctgtgtggttagcctgcctgtggttcgtgtctcgtcatttctttcctttatttttgttaccatgaagcttctctttgttttgtatgtgggtcggatgaatggctaggagggttctatgtgccaaggtcccttggtgatgggtccttggtgtatgtatgcaagtcagagccttacccacccatctgtccaactccccagccacccatgcacccacctatacacccattatccatccacccagcccttcatccatctatccacccatccatctgtcgtccttcttccctcccatccatccttccagcctcccacttccccacccttgtggtatccatcttttccagtcatggacattacgggcatcctgacagttaaataggagggggaggctggagaggcagcgaccacatcaggtggtatcctgtatgtcctgtcccgcaagaagcctgatgcttgttagtgcaagattaaggataatcttcaggctcttctctgtggtcctgggtggtgtgtctgggcgcgtgtccatgttcctgctgtgagcttgtccagcttctccttgccttccttcccctgcccactccacagcaagccccgggggagaggctgcaccatgccacagactggcagagtttgcgaacgcctttctgtggctctaagcttgcctgatagcaccagccccttgggagagataaagtaattgggggctttagttggaaggcccttctcaggggcctctcctggggaagtcaaaggaaggacaggtccttgtggacagcacagaaacagagaacatgaaagctgaatggcctcgtgggctcctgagagtgtggggaacagaagcgcctgagctgcgcccacggctacctcctggtctcctctcgcacctgctctgtggatgcgcggcttccgctcctgcatggctgtgacttctctgtccctgtctgtgtctctctcaagctccatctccctgaggaagaacattggtcaccagccactagagaggcctagcagggcccagcccttgtcccgggccacttccagcctctggccactccatagagggcctgtcagtgggagcacagaccgtcgagcccctcaggggaccacactgtgccaggcattctggtagagaagggtgggcggggcattgctggcgcccagagatgccagccccactggtggtgcctttgacatgggtcttgtccatgtgagcaagatagcgcttctgtgcctctgagcgtggctgggtgatgctgtggttgtgacagtgatgtgccagccataactggcatggggaatgcaggtggagtgaggggtgggggccgggtaatgtgatgagtggttcgatgacagctggtggccgcatcatgctggctgtgagttggacagtgttgtgcagcaggggctaggcatggcgagggccgctgtgggttatgtgggcaagatgagagagtggccctggggatgcccagggaggatggacggggtgggctattgggaaccacctggctttgtccccagccaccaagcgtcctgaggaagtgtgcgggcccacacagttccgatgcgtctctaccaacatgtgcatcccagccagcttccactgtgacgaggagagcgactgtcctgaccggagcgacgagtttggctgcagtgagcagggagctggggtcgagatgcgggccctgggctgggttctaggggttctgtccacagcctcagcctccacccttctccctcctagcccctcggagccctccttccgctcctccttcctttgcccccgacccctcactcctgccctggtctcctcagtgcccccccaggtggtgacacctccccgggagtccatccaggcttcccggggccagacagtgaccttcacctgcgtggccattggcgtccccacccccatcatcaattggaggctcaactggggccacatcccctctcatcccaggtgcggctctgggcccaggtggtggggtgggaatgaggggcagctggtccagagccctaggccagatcctaccacttgtcttggggctcaccagggtgacagtgaccagcgagggtggccgtggcacactgatcatccgtgatgtgaaggagtcagaccagggtgcctacacctgtgaggccatgaacgcccggggcatggtgtttggcattcctgacggtgtccttgagctcgtcccacaacgaggtactgccggagggcaggtgtcaccgggtgtgggggcagagccgggctgcccaccacagccggctgcagcccccgcccatgccgcccagcaggcccctgccctgacggccacttctacctggagcacagcgccgcctgcctgccctgcttctgctttggcatcaccagcgtgtgccagagcacccgccgcttccgggaccagatcaggctgcgctttgaccaacccgatgacttcaagggtgcgttggcgggcgggtgagcgctgcgggaggtgggaggtgggtacctctgtacccagggggcacagaggatagatgcggacagagggggccaggtttcgggaaggaatgtgagtcgctgaagaaacactgagccctgtcaaaaaagcatttcggggggaaaaccaagatgtttaggaagagccaaatccccccttgctacctacctgcttcaggttacggcgaggacgggccctggagccagcttccagcttcagatcctgacgtggacgctgtccacctgtgtcctgggtcaagttacccactatctcgtgtctgtttcgtcatctgtaaagtcggggggtgtggaataataactacctcctaggggttggtaaggacttagtggagtcacgtatgtaagcctctcagaattgtgctcagcgcattttcagcacccaggaggtatttgctaacgtcacagtcattgtcctcattctgagagacagaggtgccagtgtacccagattataggagcccaggctttggcatctccttggcctgagggtggcctccagctataccacttactgccgctgtgtctttgggcaagtctcttggcctccctggtcctattttcccaaagatagaggcaggcagatggactcagttctttctggcactgagaggcagaatggcaggatggctgagggcatgagcccaggcactgcctggactggggctcaggtcccagctctgtcgttttccacgtggcatcaagcagccctcaccctgctgagtctcacttcttcgttgcagaggattaaatgcatgtagagagttagctccaaagcactcaacacattttatgcccttttgttggttgaggaacctaaaaatgacttgtataaaacttagttacctggccaggcatggtggcttatgcctgtaatccaagtactttgggaggctggggagggaggattgcttgtggccaggagttcaagaccagcctgggtaacacagagagaccccatctctacaaataattaaaaacaaaaaatctagccaggcatggtggcttgcacctgtagtcccagctacttgagaggctgaggcaggaggatctgttgagcctaggaggttgaggctgcagtgagccatgatcacaccattgcactccagcctggacaacagagtgagaccccatccctaaaaacaaaacaaaacttagttacttcccaaagttgtcccccagtatatttacaatgctaatggccgtggccaccatttggtgagcaggcagttggccctgtggcttgacgtgacagtcaacgaactgccaaaaacccttgcaaggtcagggctgatttcacagttttaagatgagagccccagggctctgagatgttgtggggcttccctgggttcacacagcagtttagagggggagctgaacccagggctgtctgattggaatctgggtggtccaggggagggagtggtgggaattccagggtgagcaggtggcctgtgtgtggatggtgaccaggagggaggaggcctgaagacatccccggaaggcagggaggaaagaggattgagtaacctagacccggggctgtgctcggtcattctgcgggtgaggagctggattcccctgtggttgcagggggttaattcaggatgagggggagaagctattggcagacagatgtggactctgtataaggaagaacttgctaagagtcaaagttgtccagagccgggagggacggcctttggaggttgtacgctctccatccatgacggctgcaccatccaatgtggcagtcactggccctgtgtggctctttaaattgaaatacaatgattcattcctgagcagcacaagacatgtctccagtgctcagtggccacatgttgctggtaccattacttttaatggcaaaaccaaaccagcaattactttttcaccaacctaacagctaccgtaatgaagagtgtaggtacaggatattttcactccaccgaaagttctctaggatggagctgtcctagagatctgggaggatgctgtcaagggaattcccatgtagggtgactgtgtgtgtgtgtgtgtgtgtgtgtgtgtgtgtgtgtgtgtgtacatagaagagggttggactagacgacccatcataacaacagcaacaataagagctagccattttatatcaatgtgctcattttagcttatacctctaggaggcaggctactttaagcaccatcttacagataaggaaactgaggcccttgcccaggcttacaacacacctggacttggtctcctgttcctcagccctgtgtagctctcctgcctgcagggttgttccagccctgaaagtctgtgggtctcttagcaagaaagaccctgagaagtctggctgcaaagaatccccttgtcctttctttaccctgtggttcccaaatggttcccagctatcattccatggcattgactttcccagagcatgctttgggaaatgctgctccagtatttgggaaggaggaaaaaactgcattttctttttcttttctttcttttttttttttttttttttttgagacagagtcttgctctgtcacccaagctggagtacactggtgtgatctcagctcgctgcagcctccgcctcccgggttcaagtgattctgctgtctcagcctcctgagtagctgggactacaggcgtgcaccaccatgcctgtctagtttttttatttttagtagagacgaggtttcaccatgttgggaaggctggtcatgaactcctggcctcaagtgatctgcccgcctcagcctctcaaagtgctggcattataggcgtgagccaccacacccggcaaaaaactgcattttcttcactttggaagagagatcaaagttttctcgaaatcaaatttccactagaactttcccacctttctggattgctgcccctcaagatgggtgtatcaggcaggcccaggctgcagccctcagcctcccccttgccacccacaggtgtgaatgtgacaatgcctgcgcagcccggcacgccacccctctcctccacgcagctgcagatcgacccatccctgcacgagttccagctagtcgacctgtcccgccgcttcctcgtccacgactccttctgggctctgcctgaacagttcctgggcaacaaggtgaggggcctgggctgccaccctgggtggggaaagaattcctgtgggctctgctccttctgcagttggtggacaacaaggcagacttggagggaaaggtgttaccatgccccgatgcagccccctgtggcagcggctcatccattcagggcaggacctctcccctgcactgttggcttgggaagaagagctggcctcccctcctcccgggagccctccctgaccactcccccatgcctgggctgggttctgtgcctccgcactggcttccctgggtaccctgtgcactgcatgattccacaccctgccatggaccaaacaccctagagtcagggcctgagtctcgcccatctcggtttccctgtgcctagctcagtgcctggcacacagtaagtctcaggtaggcagagtgagggaggagctggaagactataggcacctcataggcacgaggtgtcaagtgtgcccacagctgcccgtgctgatccaccctgttgtgccaggtggactcctatggcggctccctgcgttacaacgtgcgctacgagttggcccgtggcatgctggagccagtgcagcggccggacgtggtcctcatgggtgccgggtaccgcctcctctcccgaggccacacacccacccaacctggtgctctgaaccagcgccaggtccagttctctgaggtgggtggcgcctgagcccttagggctgggagcaaagggggatttaggctgggtaggcactgatgtgtgacccctgccaccttcacccatacccaggagcactgggtccatgagtctggccggccggtgcagcgcgcggagctgctgcaggtgctgcagagcctggaggccgtgctcatccagaccgtgtacaacaccaagatggccagcgtgggacttagcgacatcgccatggataccaccgtcacccatgccaccagccatggccgtgcccacagtgtggaggagtgcaggtgcctgagccggcagggctgggaaccacagagaccctagcaaggatagaggagaaacggcagggcctcaccgtccttgcagcgactcttttggtcctgtccccacagatgccccattggctattctggcttgtcctgcgagagctgtgatgcccacttcactcgggtgcctggtgggccctacctgggcacctgctctggttgcaattgcaatggccatgccagctcctgtgaccctgtgtatggccactgcctggtgagtagtgccagcagacacttgaacactaaaataggagaagggacaatgtgtgagattccctgtgttcatgagctcagcacaagcctccagaatgactgtcatgactgccagatgaactatcatgacctctggatgcaataacagaaatataggtcaggcgcagtggctcatgcctgtaatcccagcactttgggaagcctagatgggtggatcacttgaggtcaggagtttgagaccagcctggccaacatggtgaaaccccatttctactaaaaatacaaaaattagccaggcgtggtggcgtacgcctgtaatcccagctactcaggaggctgaggcaggaaaatcgcttgaacccgggaggtggaggttacagtaggccaagaccgtgcccctgcactccagcctgggcaacagagcaagactcagtctcagaaaaaaaaaacaacccagagatacagcatccagacaagggaggtgttggccctcctctccaccctcatcagactaatcctggagagtgccaaatgaagaagcatggcctgcagagggcaactctagggggaagagcccttggggtgggaccttatttcttaggaatagtggcgagagctgggattgtggagctgacagaagaaaaggctcaagcagggcagcattgtcatctccaaatccctgcaaaggtgtcgggtagaagaaacagactctggagagcagaactggccagtgggtgcagattggaagagggtggcaggtttaggtcaataaaaagcaggcatttggaaccatctatgggacaggctgccgtgtaagatgatgagctccccatcatctataagtggttgcagttgatgctcccctgtctgcaaagctgtgcctccagcgtgatggggaggctgagctagacagcctccaaggtcccccgcagcatctggcccagttctgctctagaagttgagccataccctcctccttcttctagaattgccagcacaacacggaggggccacagtgcaacaagtgcaaggctggcttctttggggacgccatgaaggccacggccacttcctgccggccctgcccttgcccatacatcgatgcctcccgcaggtcagccccagctccgggtcagggggggtttggctggggacagtgcaacaggccagagaatattctgggcagggaggcaggagacttggattcagatctctacctgatcactaagttatcccatgctcctggacctctctaggcctctgtttccttttctgtataatgggccccctgacttcctacagttgctgtgaggctgccgggcagggagatggcgtcatgcctcgtggcacactgtgtctgtgtagacagcagtcatttcccagggtgggaggagaaagcctgaccccagccctgccccatgccctgtccacttgatacctgcagattctcagacacttgcttcctggacacggatggccaagccacatgtgacgcctgtgccccaggctacactggccgccgctgtgagaggtgagggagagccttgggggctgcaggaagggggctcctgggtggggtcatggaagtgctgatggcggccccctctctcccctagctgtgcccccggatacgagggcaaccccatccagcccggcgggaagtgcaggcccgtcagtgagtatggctgccaccatcccctgacacccacctcccaacccaacctgggctgcacaccaggcaccctccctccctgccccagctcatgaaccttggggagccactgttcctctatctgcccggaccacgtatatcccattcccacctgccctgccaacactcgttttgtgtcccagaccaggagattgtgcgctgtgacgagcgtggcagcatggggacctccggggaggcctgccgctgtaaggtacgcgtgccatctgccacccacccaggggccttgggcccagcaccacagctgggaggaggaagaaggaagctccgtcctctccatagatccttggccagtgggtggtaacccagtcagaggctggtggacctggcccaccggccttccgtaccaggacaggtggcctggcgttgggaaggagcactggttagggagtcaggtgaccacagttcaagtcccagtcattctttatgcagcctttgtatctgcattgtacctttgcttttgccatactttgtccattgtcacattgatacaatgatatagatattagtgtccccaatttgtgaatgaggaaatggaggctcagagaagggaggtcacttgcgttaggaatgggagcatcggccgggcgcagtggctcacgcctgtaatcccagcactttgggaggctgaggtgggtggatcacttgaggtcaggagttcaagaccagcctggccaacatggtgaaaccccatctctactaaaaatgcaaaaattagccaggcgtggtggcgggcgcctataatcccagctactcaggaggctgaggcaggagaatcacttgaacctgggaagcagggttgcagtgagctgagaccgcaccactgtactccattgtaggcaacaagactgaaactccgtctcaaaaaaaaaaaaaaaaaaagaatgtgagtatcaagtgtcggtgtaaaaaagaatggatggattctggagtcaggcactcctggtcttaaatcccagagtggatgggcaagctgagtaactttgtgcaagtcatttcacatccctgagcctctgtttcctcatgtgaaggatgaaggtatcacctacctctcaaggtccttaggggagttaaatgaggtgatgtcgaatggaaagcagaacagtgcgtgaaacactccataaatagaagcagcaattatttcaatcaagtcgctgtatttcaagtctaaatttattggtgaaccccctggcagccaaagagaaaagggaaaaatgcttgcctaagtgcttgttaagtgggaattactattcagatggcaatgacgcctcatacatgtgctctttcttttcttttcttttctttttttttttttttttgagatggagtctcgctcccatcgcgtaggctggattgcagtggcgcgatctcggctcactgcaacctccacctcccggtttcaaacaattctccttcctcagcctcctgagtagctgggattacagctgtgtgccaccacgccaggctaatttttgtatttttaatagagacagggttttgccatgttggccaggctggtcttgaactcctgacctgaggtgatccacccgccttggcctcccaaagtgctgggattacaggcgtgagccaccgcgcccagccacatgtgctctttcagtggctcccctgggtcttgggttcttatctggactgagggtggattcggccagagctccaggcagcctctcccatgggctgtccttcagctccaactctgtgcctgcagaacaatgtggtggggcgcttgtgcaatgaatgtgctgacggctctttccacctgagtacccgaaaccccgatggctgcctcaagtgcttctgcatgggtgtcagtcgccactgcaccagctcttcatggagccgtgcccaggtacctctgcaaggtgggcgggcaggaccgccaagccctgggccggatggaccaagcgccagtcccaggccacggcccccatcccagccctttctcctcctcccagttgcatggggcctctgaggagcctggtcacttcagcctgaccaacgccgcaagcacccacaccaccaacgagggcatcttctcccccacgcccggggaactgggattctcctccttccacagactcttatctggaccctacttctggagcctcccttcacgcttcctgggggacaaggtgggtagtgggtggaaaggcaaaggaaactccaggcagcaggaacagcgcaggcaaaggcttggaggcgggagggtcgtggtgccttgggagaatagtgagatacactgcatggaaaaggtggctggagcagtgacagggcccgaattcaggcctccgcaagctcctgtctaaccctggtcccaggtgacctcctatggaggagagctgcgcttcacagtgacccagaggtcccagccgggctccacacccctgcacgggcagccgttggtggtgctgcaaggtaacaacatcatcctagagcaccatgtggcccaggagcccagccccggccagcccagcaccttcattgtgcctttccgggaggtgagcaatactgtcccctgggggtaggggtgcgggcaggcccttgctcctgcctctccggcattcaatactccaggacgtcaggggctgagcacatgtgtcctctccttggcagcaagcatggcagcggcccgatgggcagccagccacacgggagcacctgctgatggcactggcaggcatcgacaccctcctgatccgagcatcctacgcccagcagcccgctgagagcaggtgtctggagccggggcaggaggaccagcatgggcttggggaggggctccatctaagcggtgcagtacagcacagccacttacagactgtgtgacccttttgtgcctcactttccctgtctgtaaaacggagagtcttaacaatgtctcccatacaggctggtctggggccaggctccctagaaagaagcctgagacggggattggggtgcatgtgattcacaaggagagggacgcaggaggggggaggggccatgcagggatatggtttcaggtcaagtctagccccagcctcagcccacagggagctctggagagtcattcgccggagagtgatcgttctttcaggcccgtgggctcttgtagcctgtatcagcctgtcattggggaccccaggggaacgaggtggtataacctctccaggtgaggaagggtgatggtttggagtaagttgcaggtaacagctgtttgccacggtcctcgcagcctctggagatctggacagggccccagcagcactgtgacagggctgtcgggaggactaataagaccctgccagtggaggactccaggcgtgcctggcacagagccagcactcctattcacgctgggtcttgtcacgcccagggtctctggcatcagcatggacgtggctgtgcccgaggaaaccggccaggaccccgcgctggaagtggaacagtgctcctgcccacccgggtaccgtgggccgtcctgccaggtgagtcctgggccccacgccagcccagccagccccctccatggtgcttcccgctccttctccatgagccctccacacctccccagccctggccatccagtgcccctacctgaatgggccgtgttcggaagtccctcccactgccatctttctgcccccaggactgtgacacaggctacacacgcacgcccagtggcctctacctgggtacctgtgaacgctgcagctgccatggccactcagaggcctgcgagccagaaacaggtgcctgccaggtaagtcccgccctccttccgcccaccccagcaatctgtggcctctggaggcccagcctcaactcacatcctgctcctccagggctgccagcatcacacggagggccctcggtgtgagcagtgccagccaggatactacggggacgcccagcgggggacaccacaggactgccagctgtgcccctgctacggagaccctgctgccggccagtgcgtccagtccctgcctgcacctgcccttccctgaaatgtctaccacccgctcccacacccgcttcatccagggcccttctgagaggcagtggttaaatcctggccttactgcctgctcagtgtcacttggtgtgagatacacttcactttcagggcctcagctgcctcatctgtgaaatggggtagtccaccctcctcagccccttgtgtgagagttgaatgaggctatgcatgtggaactcttagcacagtgccaggcatgcagtggcactgaggacacatgagttcacatgcctgttcttcccctcccctctcccctggtcctgaaggaggatcgggggagaggaaggagccactgcgttcctgactagaaatctgcccccacactcagggctgcccacacttgttttctggacacagacggccaccccacctgtgatgcgtgctccccaggccacagtgggcgtcactgtgagaggtgaggcagggggtggagagggtggggggatgcgcacagggggtgtccctggaatcctcaggcagggcccagcgctcccaacccagaggaatcagggatgcctctcgctcttaacctcgcacaggccccagaagacagtcagctcccctcctcgggagactcaacctctagcccagaattcaagaccctcagacacacatcctagcctgcggttcaccttcagccccctggccccctgccccagccaggccagagtcttcccacaaaacccctgcttctttctgaaactcctgggttcctacctgccccaattcactggctgtgcggtccagggcacgtccctgctcttctctgcccagtttccccgtaacatgggcgagtcaggctcttcttttcttccagtgcatgaggccattgaattcaatatggggccctcagcccagccctggggttctgcttcccttcatccaaaattcatcagaggctttttctctctgcaggtgcgcccctggctactatggcaaccccagccagggccagccatgccagagtgagtaggattggggaggtcattggggtcgggttacccagagtccctagggcggagctaggacagaagcctttactcccctttggctttgcctgtccgagcctgtttcttcatctgtaaaatggggataggagaaggccccaccacctccgagggctgtcgtgagagtgttgagtactcacatcagaaatcagagctcccgctcagtggtgagcagagtggagggaagaggggtgctgggtggcgggtttggggctccagccatggctttcttccacctcaggagacagccaggtgccagggcccataggctgcaactgtgacccccaaggcagcgtcagcagccagtgtgatgctgctggtcagtgccagtgcaaggtcagtccgaatccctgtccctgcggggcctgctctgccccgctgcccagaccctgcggggaaatcaggcagcatctggtggaagccgagacctgggcatggggggcagggcatgggggacagggcaggggctgcccggggctgctggaagtggccagggaggctggcctcaggctgctgggggtgcaggagacccactgagtcccctgcctgcctccttccatccgtctacccaggcccaggtggaaggcctcacttgcagccactgccggccccaccacttccacctgagtgccagcaacccagacggctgcctgccctgcttctgtatgggcatcacccagcagtgcgccagctctgcctacacacgccacctggtgagagcctgtgctgcccagccccaggcggtgttgccacctgctgcctgttactgtccatctgagcactgagcccagcgaccctcatccccgcctcagtaccctcacatgcccccattatttctctcgcagtcctgatctcaacaggaccccattccgcaccttaacaccctcccgtgccccatcccccaccaaggcaccccggtgctcaggctgacgccccctcctttttcccctgccagatctccacccactttgcccctggggacttccaaggctttgccctggtgaacccacagcgaaacagccgcctgacaggagaattcactgtggaacccgtgcccgagggtgcccagctctcttttggcaactttgcccaactcggccatgagtccttctactggcagctgccggagacataccagggagacaaggtgggccccagccaagcaccagggtcagccgtgactcagacatgagttcacctctgcgccgtctctcagcaggcaggcacctgccacctgcatggccatatcgtggttaggcacgtggcttttgcagtcccatagacattggtctgaaccccagctctgccgcttgccagccagacaccatttgataaacctcaacttcatggtggctgaggggattggagatcgtgcctggcacataataagtgctcagctgttcatgacttttagctttcatgcagttattctacaaacagatctgggagaggccgggaaatataaagacaagtgagacacagtttcagtgtcattcacgtgcccgctccgacttcactcatccacactgctggctctgtgcttgtgttggacacagtaattctcatgataggtcatgtgtgttgagctctcactatgtgctaggcagcatcctttacaaatcacaaatcacaactgtgtgagacaggtcctgctactgccccatttcataaataaggcaagaggggcttggtaacttacccaaagccccgcagctgggaggtgggaatgccgggatccaaacccaggtcagaggctgcccttcaaatgctctgccaaaggccagagcccacacctgtaattccagcactttggaaggctgaggcgggaggaccacttgagctcaggagtttgagaccagcctgggcaatgtgacgaaaccccgtctctacaaaaagtacaaaaaattagctgggcgtgttggtgcatgcctgtagtcccagctatttagggaggctgaggtgggaggatcgctggtacccaggatggggaggttgcagtgagccataattgcaccattgcactccagcctgggtgacagagtaagaccctgtctcaaaaaaaaaaaaaaaaaaacaaatactctgccagtcagaggtgaacctgtctttgctactccagaacagggtctggtggaaaggtggtgatgatggtggtggcgatggtgtgatggtgttgtggggggcaggggctcaggggtgggctctgggacaacctgcccaaatgtgttcttgagcagcacgggcatccggtggcacccacgctctggggttggggttgccctatccctgttcgttggacacagccaggtactccaggcttctcccggggctggctgccttctggtcccttctcccctctcccttctggggttcgctatctcctggcctccctgctgccctgtcctgcaattctcagacctatctctgtctcctgtcctggcatttccctgcgccccacagggggaggcgtactttgcgcggatgcgccgggctcaccaggtaggcccaggacgtgcgtggtgtgaagttggtgtggtggggcgtggtgccttctcgggtgctcccagccctgcgtggggagatgcgcagtgcccaaggcattgggggtctgcatgaatccaggcggtgtcccatgaccccagggttggagccaggagggtatgtgcctcaccttgcctcacctgctgtgtggtctggtcctggtgccaactgtctgaagtcagaatggcaactgaggtagcaaggagactaacccgatgctaatccacatgactgtatctagccccccgggttcccctggccttgcctctcaagcaaccaccatgaaccctctgtgtgcatgtgggcggcctggagttaacccttgggtgccagcctggagagggggggcatgcatctttcttcctaattagtgtgggcctttctgactaccatgtccgtgggtagaggaccctgcccatggctctagctccaggactttgggaggtcttagctcgcctgctccctccatttcatcagaaccgcacatccctctcagaggagcagttgcgggcagccgtgacagctgggaggatcccagagcccccagagggcagggactgggcacagcgggcatcacaggtaactgaggacctggctaggacaggttgtacctagggccacagcgaggagaccagagagctgagtccaggcaggcacctgagcgaagactccagctttcctgggccatttcccctatgccaggccaggccccagcctgatgcctggtctgctctggtgtctcccctgggaaacattccagaaccatgaatggcttgggctgttgccagggcacacaaagagagtcaggccgaggagcaacaaccccgtccagatgcccctggggctgcctccagcacttctgcccctcccttgctgggcaccctttgtagggcttctcccatcagtcacggcccataggcagccaaacccatcccgggatatccccgcctagctcaggaggaacaagagggcagtgggtacaagggccagagtgccaggtatcagcacttgtgagcagacagtgcagagcgggtggctggctgggcccgtggggaggtgaagcctcacggacgtcctttctgtccctctctgctcccttctgccgctcttcggctcctggtcccccaggtggacgaggctcagagacggatggatgctgagatctggcagctcctgtccagctttgctgcccaaccccaaccccctccccaggggctctctcctcatccccagcctgcagctgctctgcgagcagcacctcctccttcttcttcctcctcctcctcctcttcctcagcttctctgtctttctcaccaggctctcaggtatgtgccaaggtgcccatcaagggatccccacccaccatgctttctagacttcagtcatttctgaaccaacttcaccaatttctgtgaactacttggactattatttctttccaattttctcttaaatcaatcatgtaccaactcaggctggttactctctttcaaatacatatgaaaggagccatcccattgaaattgtttactgatgtgctgtgtaaacgttggtccacaaaagagacccaccagatgggaggagaagccgacccaggccacgcccagagagagcagctggggacctgggccgggattgggaagaaagtcgtccaaagagcaaggccaggacccgcactgtcgggtgggagtggggggctctgtctctctgccctgccaccaggcctccctcccatgacggtccacccctgccggaaccacctccgccctcccacccccacccctgctcccctcggctcttaccacctgcccttccctcctagttctctctctcctacgaaggcttctctctgcttcctggaagcctctattactggcagctgccccgggccttcctgggggacaaggtaacaaggatttggggggattataggggtgtcatagaatcccaaaatatcagagggccctttgtcaaggccctttatgacacaaatggggagaccgaggctcacggtgggtagagacttgcctggggtctcatgttcaggtcagagcacagctgagactgaactcagctctgcccctgtccttcagcgggccctgacccctgacccctggcccctgacccctgtcagaggagctgtctcgcctgggagggtttctctagtgccttttctctgggcttccttgaccttgtgtctagatgctggcctagtttttggtacttcactcagtcattcaagaagcattaattatttactgtgtgctgcgtcgtgtacaggccgagtgggccctggcctcccagagctccctgtccatcccattatcattcctgtcaccatcagtatcattattattatcatcatgagtgctggcattggccttagatgagtattcatattgcctctattttgttccaacaatttcaagtacctcttaagaatacacatagcaggctgggcgtggtggctcacacctgtaatcccaacactttgggagactggggcaggcgaacacctgaggtcaggagttcgagaccagcctggccaacatggtgaaaccctgtctctactaaaataacaaaaattagctgggcgtggtggcgggtgcctgtaatctcagctacttaggagactgaggctgtagaattgcttgaacctgggaggcggaggttgcagtgagcctagatcatgccacttcactccagcctgggcaacagagcaagactccatctcaaagaaaaaaaaaaaattcagcttcctggctgggtgcggtggctcatgcctataatcgcagcactttgggagactggggcaggcagaacacctgaggacaggagtttgagaccagcctggccaacatggggaaaccctgtctctactaaaaatacaaaaactagccgggtgtgttggcaggcacctgtaatcctactgcttgggaggctgaagggggagaatcacttgaacccgggaggcagagattacagtgagctgagattgcagcactgtactccagctgggcaacaagagtgaaactccatctcaaaaaacaaacaaaaaaaagaataggcagtcacaaggtacattcagagaagtgagacagggaggttgaggggtgaggataagaagcaatctgctggagccgagggtggagctggagtactgcagggttatcaagcgtgatatgcattctcaaactgtgtggagtacatcaccatttgtgtcctatattacttaatcctcatgatacccttcaaagtgggtattacttttacttccatttccatgtgaggaaagtagggctcagagaggtgaagcgacttgtccaaggctgtatagccagtagagctagagtttgaacccaggtcattcagactgtggagtctgccgttttaatcactatgctggatctgggtacaatggctcacacctataatcccagcactttgggagactgaggctgaaaaatcgcttcaggccaggagttgagaccagcttaagcaacatagcgaaatgctgtctctaaaaaaataaatcggccgggcatggtggctcattcctgtaatcccagcattttgggaggctgaggcaggacaatcgcttgagtccaggagtttgagaccagcctgagcaacatagggagaccccatctctatttaaaaaaaaaaaaaagtgcctgagcaacatagggcgaccccatctctatttaaaaaaaaaaggtgaaaaaaaaaataaaaaatttttaaaaatcactgtgctgtacacacctgcaacttgccagaaagtcagtcccagaaatggctgtgaactttctggcattcaaagcaagcaggaaaccagttattttatggttatttggttccactccaaaattccttaccatgccttgagctcatggagaatatccctgtagccatgtagcccagggccgtgtgtgtaatcagcaggtgtttgataaatgctggttagctgagtgaacacacaaatgaacaaagaggtaggcttgatgcagtttggtattgagatgaatgtctgccctggtggcagaggagagaaagcaaagtcctgtgggacagagctggggagcctcagctgtccacgtgaaggtcctctgcagcagaagtaaggactccccagtcatgagcaacacagtgcccaagtccagtgggcttgtctgcaacaaagaatctatcggctcatgcaactgcagagtctaagcatgtatggtgtcaggcatggccttatccaggggctcattagggctttatcttggttctccagcttctcatctgactgcagaagggactttctctggcctggtagaaagagcataagtgcacgggttacttgtctatccctgatggggtggcaaagggcagtggtaggttatgcagattggccaggcctggctcatgtctccactatagaggaggaggggatcagggccctcagaccacatggtctgcatgtgcggagacagttgttctttatagaaaaccacggtttagtttctagaaagcaggaactggatactgggcaaacaaaaaccacctgcctaggaggcaaggcctccgaggggctgccgtcagccccacccccatggctgagaacttttgaagcttccgcagcctccccatggtggtcattgtcattacacttgtctgccttatgggaaattcctgtaaatgaaagcagacctggagtttgttcgccggcaccgtcaggcaatggggaatagagaaccttgcagagcaaagaggctgctcagcatcatcaccaccatgtctggggctacagaggaactgagaaatgtcctgtttcccaggcaaccatgcaccctggcctcttggtttgggcagggaggggggtgggggagtgtggcacaggtgcaaaaaggccgccagatgctccatccctcacctatatggtccaacactcacaccccaaggtcagcctgtgacctctgggcttgcctctttgcaggtggcggcctacggtgggaagttgcgatacaccctctcctacacagcaggcccacagggcagcccactctctgaccccgatgtgcagatcacggtgagcatttggacaccatgctgggtgggcagaagggcaggatggaagccaggggcaccctcggcatttgtcctttgtcctttccatccagcactcagttttctggcacaggctgggggagttaggcccatgcccccacatccctgcctggttggacactacccaagcagaggatcctgctgctgggagaagggggcagtgggcatgtgcctgactcctttgggcgcatgagcttgggagagcagagaggtgggaggctgggggttacagagaatctaggactggtggaggacaccctggcaccccagggacccctcggctccccttccaatcctgctggtgtctttccagggcaacaacatcatgctagtggcctcccagccagcgctgcagggccctgagaggaggagctacgagatcatgttccgagaggtaaggggcacctggccatgctgtgtctaaccccaccccaccctccaccctgactcagagcctggctttgatacccaccctgtctctcgctccccaaccttcacctggcagccctcagtcagtgcctgtaaggcaggatttggggggtggtaactgtaggagcagcccacaaagcccactgcccccgcccacgttgccacccccaacccaggaattctggcgccggcccgatgggcagccggccacacgcgagcacctcctgatggcactggccgacctggatgagctcctgatccgggccacgttctcctccgtgccgctggcggccagcatcagcgcagtcagcctggaggtcgcccagccggggccctcaaacagaccccgcgccctcgaggtggaggagtgccgctgcccgccaggctacatcggtctgtcctgccaggtgagtgtgtggccagctccaccacctctgcacaggcacagaggcatcagcaagcaaatcagccggcgtcgccgcagccttgattaccatcataactataatgacccctgcatctgggccctgcatgtattcctcccgacagccctgagttacatatcattatcccctttaacaggtaaaaaaatagaggtgctgaggggtgagtgtgtcccaagggcacacggctaatgtgtggcagaaactaatttgaacctgggtctgattgactccaaagcctagcatgtcctaaccactgggcagtgcagcctcacgtttgggccacactctccgggggttaaaacccagttcatgcccttgagggggcccaccagagacagggagccaattcagaaacacagattactccggcccaaagcacagcatagagatgcctcccagaggtgaacagtgtggactgggagagggccgtgggtgggaggacagactgagcagaagtggggaaggaggggcgccggcctgtgatgttccagggtcacccctgggaggacactggagggaggggttctgggtctgctggctgtgggtggggcacgttgggaacagaggccaaccttcctctctgcccctaggactgtgcccccggctacacgcgcaccgggagtgggctctacctcggccactgcgagctatgtgaatgcaatggccactcagacctgtgccacccagagactggggcctgctcggtgagctgcaagcgaggccaggacagggggtcagctcagctgggcctgggtgggggaccagggctggacaaggcaggcatcaatccaggggatcaggatcatggggcatggcctgtggttcaaagcacctgggtcagcaggccaggtcaccggggatggtggggtggccagagctatggaataacatccttctgtgtaaagaaaactttggttctttactatttttttctttttcttaaaaaaattttttttatctaatacagatggggtctcactttgttgctcagaaggtcttaaactcctgagctcaagcaacccacccgcctcggcctcccagagtgctgggattacaggcgtgagccaccacacctggcctttttactttttttttttttttgagacagggtctcagtctcgttctgcctcctgggttcaagtgaatctcatgcctcagcctcccgagtagctgggactacagacatgagccactgtgcctggcctcattacatatattttttataccttgacttttcagagtagcatgtatatagccccccagggtacgcagtgaaggggcaggtggttgacagccataacctaaacttggagcaaggaacaccctattgttgataccacaaacgtgaatctctttggaggagaatctgtaacccacatgtttttatgaggatgcacgtattttctttttcttttctttttcttttttttttcaagacagtctcgctccgtcacccaggctggagtgcagtggcgccatctgggctcactgcaagctccacctcctgggttcacgccattctcctgcctcagcctcccgagtagctgggactacaggcgcccgctaccacacccggctaattttttgtgtttttagtagaggcggggtttcacctgtgtcagccaggatggtctcgatctcctgaccttgtgatccacccgccttggcctcccaaagtgctgggattacaggtgtgagccaccacacccagcctcttttttttttttttttttttttttttttgagatggagtctcgcttttgtcacccaggctggagtgcaatggcacaatctcggctcactgcaagctccgcctcctgggttcacgccattctcctgcctcagcctctggagtagctgggattacaggcacctgccaccatgcctggcgaatttttgtatttttagtagagatgggatttcaccatgttggcaggctggtctctaactcctgatctcaggtgatccacccacgtcctgagattacaggcgtgagccactgtgcccggctgacaatacacatttttaatgctctgcccccaaatacctgagtgtatacctttcctttgctatcacaggtacttagggagaaaatagaattagcatcaccctttttgacagctatttggatggatgtactttttaatttatccaattccctattcatggatgtttaggtttgtttctagctttttttgcttttttcttttttttttttttgagatggagtctcgctctgttgcccaggctggagtgcagtggtgcaatctcggctcactccaacctccacctcctggattcaagcaactctcctgcctcagcctcctgagtagctgggactacagacgcacaccaccatacccagctaatttttgtatttgttagtagagatggggtttcaccgtgtcagccagttggccttgaactcctgacctcaggtgatccacccgcctcggcctcccagagtgctgggattacaggcatgagtcactgtgcccagcccattttgctttttataaacaccacggagatgagtgtccttgtaatgaaatctttgtgcccttccatgattctttctttaagatgagttcacaaacttggaatttctagatcaagggattgcaaccctgaaaggcttctggtaaatttggcctaatggctggtgcctgccctccttgtgccctgcagcaatgccagcacaacgccgcaggggagttctgcgagctttgtgcccctggctactacggagatgccacagccgggacgcctgaggactgccagccctgtgcctgcccactgaccaacccagagaacatgtgggtaccctagctcaaggcccaaggacacacttccactggggaatgagtggaaggcgttgcactggcttttggggcagaagtgaagggagcaagatggagattgggcttcccatgacctgacctttgcctccccgatcccaggttttcccgcacctgtgagagcctgggagccggcgggtaccgctgcacggcctgcgaacccggctacactggccagtactgtgagcagtaagtttgtaaacagaagtagggggagggtggaggacaaatggtggactcccaagtgagagccttaaagggtgttgctcagaaaagtctcttctaggattatgctccttccctgcctcaaacacttctaagacacctcattgctcttgggacaagcccaccctccttaggcagctttactgtagcagtctcatcccacttctgacacccaactctgtactttagctgggcttaactttttaaatgctttttctttctttttttttttttaaactgagacagggtctcactgtgttgcccaggctggtcttaaactcctgggctcaagcagtcctcctgcctcagtgctggcattacaggcgtgagccaccatgcccagccactttttgaattcttgatgttcaggccttgcttatgctgttccctctgcatggaacagtcttcacccctaaaccacccgttcctggctaacttccccttagccttcagacccagcttcattcactcattcagcaaatttttatcaagcagctcctgtgtaccatgctgtgtgctgaggtgttggagataatggagtgaacagaacagattccaccccagcccttacggagtctgccacctaataagagatcagccctaatgggagataagacagggaaaaagtaattgtgcaaatgtgtatttacaaaccatgttaagttatctgaaagaaaagtacagcctgctctgaggtaatacgagaagtcccatcctcttggaagcctccctggctctccaggctgggccagtgccctcctctgcacccgcacagccctgatatgcttcctgcactctcattttcatgtagaatttccatgttgggttcccaactagtaagtcccacagaccagggactttatcacattcattgttgtatttccaacacctatagcacatgcctggcattcagtcattgcttaatggacatttgctggccaggcgtggtggctcatgcctataatcccagcactttgggaggctgaggtgggcggatcatgaggtcaggagatcgagaccatcctggctagcacatcctgcctctactaaaaatacaaaaaattagctgggtgtggtggcgcacccctgcagtcccagctaattgggaggctgaggcaggagaatggtgtgaaccccggagacggagtttgcagtgagccgagatcgcaccactgcactcgagcctgggtgacagagcgagaatctgtctcaaaaaaaaaaatggacgtttgctgaatgaatttctctggagaatagagaccttacctctctcatcacccaacctgctaacactcccttacactcccctttctcagttcaccagcaccctgcgttggggcctgtctggtccccaaagtgcttccagagctccgagcctcctcacctgacattgggtggcctgctgagcttctggctccccaagtccaccatgaggcactggggcccttgaggcctgacattgccggcccttgttcccccttacaggtgtggcccaggttacgtgggtaaccccagtgtgcaagggggccagtgcctgccagagagtaagtgggaccatggcccaggatggggacgatgggcaaggcagggagccctgggaatttgggggatactgggtctggggacagggctgagggtggggtaccccagcttttgggagagcagagatattgaagacaatgctgaaaggcccttcctgtcccggcccccacccccagcaaaccaagccccactggtggtcgaggtccatcctgctcgaagcatagtgccccaaggtggctcccactccctgcggtgtcaggtcagtgggagcccaccccactacttctattggtcccgtgaggatgggcggcctgtgcccagcggcacccagcagcgacatcaaggtacccatggccctaggctcctcagccccaagagccatcccagtgggaggggaggcaggggcctgtccctgccctagtgggatgctgtccttgtgcatggggctggatgtgagaaagagtgtatctgcaccaacaagctcttgtctcctccccaccaggctccgagctccacttccccagcgtccagccctcggatgctggggtctacatttgcacctgccgtaatctccaccaatccaataccagccgggcagagctgctggtcactggtgagtccctacgccccctgtaaccaagactgcctgtcctgggctgggctgcaggctgcagattcaggcagatggtgcattcacctgctgggagggggcagtggttgcccgaacaaggtcagcagccatggagatgaggagaggtggcagattcaagactcattttagaggtaggatcagcaggacttgactggtcggtgagggcaaaagaaaagggtgggccgggcacggtgggtcacgtctataatcccaacactttgggaggccaaggtgggcagatcatgaggtcaggagttcgagaccagcctggccaacgtcgtaaaaccctgtctctagtacaaatgaaaaaattagctgggcatggtggtacacacctataatcccagctactcgggagaactgaggcaggagaattgcttgaacccgggaggtggaggttgcagtgagccaagattgcgccactgcactccagcctgggcaacagagcaagactctgtcttaaaaaaataataataataatgcacctcagagtcaccctgccctgtcgtccagggaaaagtgagacagggatgggagggcgtccataaaggctgtgtcaccaagcagattgccaccgtgagcagttgttgcttagtacaaccgaggaagcttttaaagggagccggtgtaaaacacgcacctcaaagtcaccctgccctggggtccaaggagctgcagtatgtctaggccagcttctgtcagtcattgactgagacctattctgggagcatcaagtcccctgcacatctgtcccacccatgggtgtgcactgtgggctccagtggcctgagaaagccctcaatgcaaagaagtgcagtggctggcagaagtcaggcaggtgggcacggggggtgggaagcgtggctaggccaccagcagcacaggctacaaacaggtcagagagaatcgcaagtttgttttggacgtgttagagtctgagatgtttgggaagatatctcattgagtccaccaggcaggcatttgggtatgtgagtctgaactccagtaagaggccccagccagagaaatgagtatggttgctgttggcacagggatggtgttcaaagctatgggacaggatgaagtcacctagggagagtgtggcccgaggacagggccccagcccagagtcctgaggagctccagtgtgaacatgtcaaatggaagaggaagggcaggaagagcctgagagagtgcagccatgaggcaggaagagacagggggcatcatgggaatcagagggaaaagggctttcagggcagcctccctgctgggaagtcacataagggcagagaaatagcccttggaggtcatgctttgacaagagcggttttcagtggagagaagggatagaaaccagattggaaggaggcgacacatgggtgggaaggcagcgagtgtggacaactcctgcaagagtcttggctctgaagggaggccaggaagtgggtcattgactgcgagagcatgaggtcaagggggagttttcggaaatgggaaatcctagaatgcactctggaccgaagtgatcgcatgagaaggaggagacgctgatgttgcgagagcagaagaagccccggggaggggtggcactcaggcgcagcagtgggatggggtgagggcaggagaaggggcctgtccttcagggaccagtatctagagagctggtagatttgagaggctgggaaaactcctgacttgtcgtttctattttctccataagtgtgtgtcagcgccactagctaagaaagtggaagggtggttggagaggctggaggagatgggaggaggtgtgaaatagttgtttttgggggatagaaactcaaaccagacggagaaacccagttggagtggggtgtgatgtgtcaggagctcattgtggtctgtgatcaggaactggagccaagtggacccatggtgtgatgttccccaaccacatcctgtggccactctgtgctggcaaggagggtggggatggtggggttcagccagaatgggggagggaggtgccagggggtagaatgagagctaggctggaccaggaaggaagtgatgcctagaggttatggagaaagacaaagtggccacaggaccggggcctagccagcaccggctcacaggggggcttcccgtccctgcagaggctccaagcaagcccatcacagtgactgtggaggagcagcggagccagagcgtgcgccccggagctgacgtcaccttcatctgcacagccaaaagcaaggtgtgcaggtcagggagtggggatggaggaagtctgtcttctggggtctctgagccccacccatgaccccctttcgccttgccctgcagtccccagcctataccctggtgtggacccgcctgcacaacgggaaactgcccacccgagccatggatttcaatggcatcctgaccattcgcaacgtccagctgagtgatgcaggcacctacgtgtgcaccggctccaacatgtttgccatggaccagggcacagccactctacatgtgcagggtacacctcccatctatacctgattctcccctcctgtctctcccccattcccaccagaattagcacagcatttcttcattctgctgatcatttctgagcacctgctgcatgcctggtcctggtctaggctctgcagaagcaggggagagaagcatgtacagtatctcggtcctcctgaagtacacgtcctaggcagggagaccataagcatgggaataaatgaacaagcaagataactacacatggcgatgagtgccaggctaggaatgatgagaaagcaagaaacaaggtgggagaaggccaggagcggtggctcacacctgtaagcccagcactttgggaggctgaggcaggtggatcacttgaggtcaggagttccagaccagcctggccaacaggtgaaaccctgtctctactaaaaatacaaaaactagctgggtgtggtggcaggtgcctataatcccagctactcaggaggctgaggcaggagaatcgcttgaacccgggaggcttaggttgcagtgagccgagatcgcgccactgcactccagcctgggtgacagagcaagaatccatctcagaaaaataaataaaataaaacaaggtgggagaggcaagggctactctagatagggcagtcagggagggcctctctgaggaggtgacacctaagctgagacctgaaggaaaggtaggcattgagcaagttagagagttggcagagtgttcttggcagagggagcagcacatggcaaggccctgaggcaggagcacgttgctatgtttgaggaacagcagagaccacgtggctggggctgtgggagggaggacgggtgtgggcagacgggagagcatggagtatgtggtggatcagggtaggaattttggattttattctaaaagcaacagggagtcatggacaggtctcaaggtgggaggtcacaaggtcctgttgacatttcccaagctccctctggctcctgtgtgcacagatggccgtggagggctagcctggaagcagagaaagtaggcagcaggactgttgtgtgagtcagacgacactccccaccctgagtgcatgttccttttcctcccttgtcagcctcgggcaccttgtccgcccccgtggtctccatccatccgccacagctcacagtgcagcccgggcaactggcggagttccgctgcagcgccacagggagccccacgcccaccctcgagtggacaggtgaggccgtgatgggaatgacattcaaggcctgactctcctgggtgtgggaggggaggggcaggactctgagcaggcttggtgggtgctgaccccacgtctactcgtcagggggccccggcggccagctccctgcgaaggcacaaatccacggcggcatcctgcgcctgccagctgtcgagcccacggatcaggcccagtacttgtgccgagcccacagcagcgctgggcagcaggtggccagggctgtgctccacgtgcatggtgagaggccgggctcagggtgggggccgggagtgtgctcagcccagggcgtgttctcacaggactctgtctgcagggggcggtgggcccagagtccaagtgagcccagagaggacccaggtccacgcaggccgcaccgtcaggctgtactgcagggctgcaggcgtgcctagcgccaccatcacctggaggaaggaagggggcagcctcccaccacaggtgaggagatgggcccacccaggaggaggaggcccacaggctctgcagagagtcccagccaccttccctcccccttcacgccccaccccacctcctcctctgtggctcccttcacctccaagatggtggtctcctgcccctgcatcccagcagggagcccctgccgtcctcttggctgcctggcgtttgtcctccttcatgccccactgggccctaatattggccctgcacctgcctctcccttttatgccctatctgtccccctggccagccgttgtccagctgcctctggggcagctgacccatctcacccacggcaggcccggtcagagcgcacagacatcgcgacactgctcatcccagccatcacgactgctgacgccggcttctacctctgcgtggccaccagccctgcaggcactgcccaggcccggatccaagtggttgtcctttcaggtacggactctctgggaatggaggggtggggagggcaagccagggctcccctggggcctgctgacccctactctggccccagcctcagatgccagcccaccgccggtcaagattgagtcctcatcgccttctgtgacagaagggcaaacactcgacctcaactgtgtggtggcagggtcagcccatgcccaggtcacctggtacaggcgagggggtagcctgcctccccacacccaggtatgtgggccctgagcctatggcaggggacccagggtgcaggggctgtggcggaggcggggcctgtacgctgggcgggggaggcggcacactgccccacacgttccaccagcagaagccaggcctcatctccctccctcccagtttctagcatgggatggctcggagcagagccagtgagagtttgaatgaatcactgaggctgagggagtggtgacaatagcccccgtccctgtcctcacgtacctctggctcctcctggcccaggtgcacggctcccgtctgcggctcccccaggtctcaccagctgattctggagaatatgtgtgccgtgtggagaatggatcgggccccaaggaggcctccattactgtgtctgtgctccacggcacccattctggccccagctacaccccaggtgaggagccaggtgtggctgggccggggctgagccctaggagctcccaaggaagatgcctgtggcttcttcagtgggaccaggacaggggggcattccaggcaggctttgacccttcagcgcctgctcagagagagaaggaggttgagtggacgggagggaggttaaggctggtccagcttacctgggctccctatgagtgactgtttcagaatttgtcaggaagcagcagaatgtccaggttgaatactaagctgggagtcggctgacctggttcaaatcccagatctgccccttagcaaccttgaactagcttttaacttttggggcctcagattcatctatgaaatggagcagtactgcccacctgcttggtcatggtgtggtttttttattattttattttattttattttattttattttattttattttatttttttgagagagagtctcgctctgtcacccaggctggagtgcagtggcgcgtgatctcggctcactgcaagctccgccttccgggttcacaccattctcctgcctcagccttctgagtagctaggactacaggcacacccgccaccaggccggctaattttttgtattttttttagtagagacggggtttcaccgtgttagccaggatggtctcgatctcctgacctcgtgatccgaccgtctcagcctcccaaagtgctgggattataggcatgagccaccgcgcctggccagtcatggtgtggtttaaatgagacagtgtctatggaaagtacttgtgagcacacggaagacgtcctgtagaagggaggtgtctcactgtcatccgcatccttgggcgcagcctgggtagtaaagcttgctggttccctatgggccagaggagctcatcatcaagaagtcatgggtgggtcaatgggcctccagcttgtggttagaggctggggagggaagaagccatattcggctggccatgtggaggcagaagggtgtggccctagtcccagaaaggccacctgtcggccgtccccactagggcctggtcacagcccagagccttctgccccagggctacaggttacagcccaagagttcaggcctctgagcagccgctctgtgtccagtgcccggcagcacccggcccatccgcatcgagccctcctcctcacacgtggcggaagggcagaccctggatctgaactgcgtggtgcccgggcaggcccacgcccaggtcacgtggcacaagcgtgggggcagcctccctgcccggcaccaggtatggcagccccccgggaccaccttgctggaggggctggatgggactgttccagccccctcccaacccaccccatttgcacacagacccacggctcgctgctgcggctgcaccaggtgaccccggccgactcaggcgagtatgtgtgccatgtggtgggcacctccggccccctagaggcctcagtcctggtcaccatcgaagcctctgtcatccctggtgagtgactcccagtgacatggaaagctggaggaggcagagaggcctccggggtggtgagatccaagggacccctcttgctgacagggcagaaggcccacaccggagctggctgcagggccctgcccaggccgactccacctgtcagagtaaccaccgccttcccgtcacactttgctttggccacatgactcctcaggcgtcccctcccacctcctcttcctctctccaactcatctctgccctcatctctctcacttcctcactcccctctgcaaggcgtggcccatgccctggtcctcccatcagggttgctgagctgagggcatcaagtccaggcccccagatgcctgaaaagctggatctggccttgaaaccctgggctgagctagctgcagggtgggcaacccctgccctctcatctcaggagcatctacaactctcactcccatccccactgctgcaggacccatcccacctgtcaggatcgagtcttcatcctccacagtggccgagggccagaccctggatctgagctgcgtggtggcagggcaggcccacgcccaggtcacatggtacaagcgtgggggcagcctccctgcccggcaccaggtacagggcaccaagaatgtgggacggggccatggacagtgggttgcaggatcctggcccctaggctgaggggctggcacttcctagatcggggggacagcggtggggcatttgctggcctccgggaagcccccctcacacctctgcccacggctgcccaggttcgtggctcccgcctgtacatcttccaggcctcacctgccgatgcgggacagtacgtctgccgggccagcaacggcatggaggcctccatcacggtcacagtaactgggacccagggggccaacttagcctaccgtgagtggggccaccaggctgggctgggatgcagagaacaggctggagtggcttcagagaacaggagtgaccggtgaccatcttatccctcagctgccggcagcacccagcccatccgcatcgagccctcctcctcgcaagtggcggaagggcagaccctggatctgaactgcgtggtgcccgggcagtcccatgcccaggtcacgtggcacaagcgtgggggcagcctccctgtccggcaccaggtatgggactggaggacagacaggccaagaagaggaagcgggtccctgggtggcggaggttattgggggagggctagaggctcccctgagatcaggaagccctggaccccattgcacagatgtatagtgcagtggttagaaaccagaatctaggactgactaacctgggtgtgaattctggctccaccacttagcttgtgacctcggacaagttacttaacctctctgtgctatagtttcagggcctataaaatggtaacaatggtacgtaccagccgggcacggtggcttacgcctgtaatcccagcactttgggaggccgaggtgggcgaatcgcctgaggtcgggagttcgagaccagcctggccagtatggtgaaaccccatctctattaaaaatataaaaattagccgggcatagtggcaggcgcctgtaatcccagctactcgggaagctgaggcaggagaatcgcttgaacccaggaggcggaggctgcagtgagccaagatcacgccattgcactccagcctgggcaacagagcgagactcagtctcaaaaaaaaaaaaaaaagtacctcacagaattatcttaaagattaaaatatatgcaaaatcctcagagcttaggctcacagaaagtactctaagctgttaatattttactataatgccattagctattgttgttaccatattttgtagaatttaggataccactgattgcgagatccgctatgattttatgtacctctaagaaaaagcttctatttgtaaggttattcattgtagatgcatcttgattttggagacatcgaaatgtgtgtctagaattgatgggatgtggtgtgagtgtgtacccagctcactggggctcctctggtctaccaccccgctgctggacaagagtcccccttccccatgtgaaggacagggaaactgatccagagctgatggccaggccttgggggtcagagtgaggcagggttgcaggttataggaacaggggtctcctgagggctccctctgactcacccccattctggccagacccacggctccctgctgagactctaccaagcgtcccccgccgactcgggcgagtacgtgtgccgagtgttgggcagctccgtgcctctagaggcctctgtcctggtcaccattgagcctgcgggctcagtgcctggtgagtagctctcagggagggcagggctggggacccagggtgggaggccccccactcttgcaacggcaggatcaggaggccaagccgcagactgcacctgccttgagaccaggagccccatctcatctcacctcctagccggctattgaccctttgccctctgtccccagcacttggggtcacccccacggtccggatcgagtcatcgtcttcgcaagtggccgaggggcagaccctggacctgaactgcctcgttgctggtcaggcccatgcccaggtcacgtggcacaagcgcgggggcagcctcccggcccggcaccaggtaggaggcaggagctcaggaagcctgaaggaccctgtagctgcagtacaagagcataggcttgaccgggcgcagtggctcacgcctgtaatcccggcactttgggaggccaaggcaggaagatcacgaggtcaggagtttgagaccagcctgaccaacataatgaaaccccatctctactgaaaatccacaaattagccgggcgtggtggtgcgcgcctgtaatcccagctactcgggaggctgaggcaggagaatcgcctgaacccaggaggcggaggttgcagtgagccgagatcgtgccgttgcactccagcctgggcgacagagcaagactccgtctcaaaaaaaaaaaaccacaggctttgaactcaggcatgttcgagttcagacactgttccgctacttgcatgctgtgtgactttaggccagtcacttgtcacttgattctctgaccctcagtgtcctatgattttatgtacctctaagaaaaagcttccatttgtaaggttattcattgtagatgcatcttgattttggagacactgaaatgtgtgtctagaattgatgggatgtggtgtgagtgtgtacccagctcactggggctcctctggtctaccaccccgctgctggacaagagtcccccttccccatgtgaaggacagggacagtgatccagagctgatggccaggccttgggggtcagagtgaggggccaaatgggctcatgctgcctacctcatctcccctgtagcatgtcaacaaacactggtccccacttttctctggtgccaagtctcagtcgtccctggcatgggtgaggtgggacgctagacccagtcctgacactggggcggtagataggaagggagaaggtggttttccctggaagagtttccatcgagttccagctggctgggctgggagtggcaccagggaagggaacaggagcttggcgtgagccgcagtgcccagctctgagcctgcctcctccctcctgaccctcccaggtgcatggctcgaggctacgcctgctccaggtgaccccagctgattcaggggagtacgtgtgccgtgtggtcggcagctcaggtacccaggaagcctcagtccttgtcaccatccagcagcgccttagtggctcccactgtgagtgtctcgggggtcatgcaaatggtggagggctgggggaccccgactgcaccctcagcagctcccacaccctgccttacatctcaccctcccagcccagggtgtggcgtaccccgtccgcatcgagtcctcctcagcctccctggccaatggacacaccctggacctcaactgcctggttgccagccaggctccccacaccatcacctggtataagcgtggaggcagcttacccagccggcaccaggtacagggccagcaggtggggagggcaaaagcagggcacaccagcccccaatgggaagaggggggactctcagcacctcactctgtgctcattcagtcattcaacaaacattgagtatccttgctggatgggtcctagaccagtgctgagaatacagaaataaggctccctgacctcagggagatccacttctgcaccaaatctcactgaaaagctgctccgggccatgtcctgtgcctgacactgaagattccagatggaatgagacagttgcctgctctcaggcagctcgcaggctgtgggagccccagcaggatactgtgtcaacactccggagggccttaacaggctttctggaggggtgacaaaaggctagacgtccaccccagcccagagacaggccacatgccatgctgggagcttcacgaaggccactgaggaggcaaggcagggaggcccccagagtccaggggcagcggcagcagtgcccaagatgtggaggagctgcccacacctactgccatacctcctgccatctgcttcctgcagatcgtgggctcccggctgcggatccctcaggtgactccggcagactcgggcgagtacgtgtgtcacgtcagtaacggtgcaggctcccgggagacctcgctcatcgtcaccatccagggcagcggttcctcccacggtgagagcagagagggcagggggtacagacaagtggcgcagagggtggcagagaggtccccggtgccatcactgttatctcactctggctgcgtggtccacacccgtctgtccccagtgcccagcgtctccccaccgatcaggatcgagtcgtcttcccccacggtggtggaagggcagaccttggatctgaactgcgtggtcgccaggcagccccaggctatcatcacatggtacaagcgtgggggcagccttccctcccgacaccaggtacagagtggagccacagcagcgggggtggaaccatggtctcctggggtgagcagagcaggctccctgtctcacggattgggccctgggtagaccgatagcagcctcaacaggctgagcaggaaggcctgagccagctggtgaccccagcgtccctccactccctctccctctccttccccatccgcacgtccagacccatggctcccacctgcggttgcaccaaatgtctgtggctgactcgggcgagtatgtgtgccgggccaacaacaacatcgatgccctggaggcctccatcgtcatctccgtctcccctagcgccggcagcccctccggtgagtctgcctaggaaagggacgagggatgcaggcaacagtgttccctggggagaaggaactttcaggtcagagtcctcagacctggtggtactcaggcaagggccagcggaaagatgcgtgggttcagtggctacggctaccccatttctaacatttcaaattctcaatagccacgtgtggcttgcagccactgacttggcctgtgcagataaaaagcatttccatcatcacaggaagtttacgaattttgtgagggttaagtgagttagtgcatgtaatgtgcttagagcgtgcctggcatgccagaagtgctttataagtgttaactattattatcatttttttttttttgagagggagtctcgctctgtcacccaggctggagtgcagtggcgcgatctcaactcactgcaacttccgccttccaggttcaagcgattctcctgtctcagcttcccgagtagctgagactacaggcacatgccaccgtgcccggctaatttttgtatttttagtagagacaggatttcaccatattggtcaggctagtctcaaactcctgacctcaggtcatccacccacctcagcctcccaaagtgctgggattacaggcatgagccaccatgcccggccaagtgttaactattagtgttactctggggggtgagattttctatggcagagggtcccaccaaccctgttcccaaatctgacaacggctgtgccgactcactgatctctgttcccccagcccctggcagctccatgcccatcagaattgagtcatcctcctcacacgtggccgaaggggagaccctggatctgaactgcgtggtccccgggcaggcccatgcccaggtcacttggcacaagcgtgggggcagcctccccagtcaccatcaggtatgcagctggcaggaaatggtgggagagccgctggatgtgggggccctggctagctttgccaagagggagacctaggagcccccgtggggtgcagtacccccctgtgtcagaggttagaccctggccccaggccttcaacagttccagactggcacctgactctgttcctctgtcctgtcccctattcagacccgcggctcacggctgcggctgcaccatgtgtccccggccgactcgggtgaatacgtgtgccgggtgatgggcagctctggccccctggaggcctcagtcctggtcaccatcgaagcctctggctcaagtgctgtccacgtccccggtgagggtccctgcagtgggacgggaaggccgggggagggaggaagggacagagaccagggggcagaactggcagaaggaaacactttctggcactcggcgagaactgccgctctgattccagacttcacctcccgccacccacacggtcccaggaccaaggagccggctcaggtggagtggttcctgtccctctccacggcttgcgagcataggctttggactatgctcatctgtgcatgagtcccagttcctctggccacacttggagatgttgcacaagggacctcagctttccacctgtcactgtcccttatctgtaaagaaggggtagtagtactcttgtactctactatctaattatagagttcccaaaagcctgggactgcacctctgcgagtattggagggtgatttacacatctttattagagccggtgtggtagctcccacctgaatcccagcactttgggaggccgaggtgggcagattgcctgagctcatgagttcgagaccagtctgggtaacatggtgaaaccccatctctactaaaaatacaaaaaattacctgggtgtggtggcgcctaccgttagtcctaactactcgagaggctgaagcacaagaatcacttgaacccaggaggcagaggttgcagtgagccaagattgcaccactgcactccagcctgggcaacaaagtgagactctgtctccaaaaataaataaataaataaataaacatctttattagtactggtggcatataagggacaaaaaaacacatcaagcctgtccttatttcttggaaatctttgcttacaatggggctaagtagttaaggttttttttgttttgttttgttttgagacggagtcttgctctgtcgcccaggctggagtgcagtggcatgacctcggctcactgcaatctccacctctggggttcaagcgattctcctgcctcagcctcctgagtagctgggattacaggtgtgctccaccacgcccagctaatttttgtatttttagtagagacggggtttcaccatgttggtcaggctggtctcgaactcctgacctcatgatccgcccagcccggcctcccaaagtgctgggattacaggcgtgagccaccgcgcccagtgtgtagttaaggcttttttaaagtgaatcagttgaaaggaaaatgtccagtaattaatagcacagggggcacatgctatgcagaaatcatgataaggggacacagattgctaagcagtaaacatgatccagcacttcttaggtgttggaccctatcatatttacacatattagttcattttatcctcacaacagccctttgaggtagatggcattgttctctccattttacagatggggaaactgagactcagagaggtgaagttgttttccaaaggtcatacaactaatcaatggcagagctgggatttgaacccaggcagtctggccccagagtctgggttcttagccacattctatctgagtctgccaaacattagtggtctagtggtctgtgtggaagtgtctagacctcagccctggccccactggtgctgggagcatgggaggaggaggagatggtggggccattgcctgggggcggggctgggggaatgagaagtgcctccacctcccaggctagcccagctgctccaggcctcaatggaacgggaagggaaagaagccatgtcccaaatggcctctggtcctagtatctgggccccaggggaagggctgagggcatcagggtggcatctcagctcactgacctctcccctgtgccccagccccaggtggagccccacccatccgcatcgagccctcctcctcccgagtggcagaagggcagaccctggatctgaagtgcgtggtgcccgggcaggcccacgcccaggtcacgtggcacaagcgtggaggaaacctccctgcccggcaccaggtaaaggagctggagaaggatgcatgcatcctccacacctgcagtggtcctgcctgaatccagcgttgaagggaaagtggcctcagcaactggggcttgtgggaaatggcagcaggaggtcaatggaatcaggaagttgagagcgggctgggcacagcagggccaccaccagccccacagcaccttggtgcaaaatagaaaaggacatctctggctgggcgcagtggctcatgtctataatcccagcactttgggaggccgaggcaggtggatcacttgaggtcaggagttcaaagccagcccggccaacatggcgaaacgaaaaacacaaaaattggccaggcatggtggcagatgcctgtaatcccagctactcaggaggctgaggcaggagaatcacttgaacccaggaggcagaggttgcggtgagccgagattgcaccactgcactccagcctggatgacagagcgagacactgtctcaaaaaaaaaagaaaaggacacctgttactcaaggctcttgacttcctcctgccggagaaaccatcataataaacatgccctccacaatgcggactgtcaaaggggtcgcctccaacaggatgcgcctacatatctgtgcatggcagtcccagggtgtgggtaccagaggcctgggcatctgaaggctcccagctcaccctccccgctctcaccccaccttggccaggtccacggcccactgctgaggctgaaccaggtgtccccggctgactctggcgagtactcgtgccaagtgaccggaagctcaggcaccctggaggcatctgtcctggtcacaattgagccctccagcccaggacccattcctggtgagtgatagggagcagtgggcgatgccagagcacaggcgcggggctccttcccagctctgctcctctcctctctcccagccgggcacttattgttgcctgcaggcggggtttcctaccacggaggatcaagccaacccaggtgttcccaagtctgacaatggtcccgtcccctcaaccagggggaccccagccctgagtttcaggaggacccttgagtccccagggaaaggagacccttcttaggttatatcagccactctcaagccaccgcgcccccaggatcaactggagctggtcttcactgccaccaccttcagcccctgccttgatccccggagcctggcctctctcacccaccccctgtgcccacagctccaggactggcccagcccatctacatcgaggcctcctcttcacacgtgactgaagggcagactctggatctgaactgtgtggtgcccgggcaggcccatgcccaggtcacgtggtacaagcgcgggggcagcctccccgcccggcaccaggtacaggggccaggatggggaggattccaggtcaggcaaggttagacctgcagttgctttctgtacccaaacctcatgcaaacaccagcctgcttggggaccccaggggataaaatacgtttgcgggacgagttcaccagcctgcaaatcaggagacctgggtttttctcttggctctgcagctgaatcctttcctgggcctcagtttcctccactgtaaagtgagtgggttggacctctaggattctgtgaatgaagcttccaccagccctaccagctgagaccctgagcttccgagagaactcttgggtaccggcacagttgggcttggggacattccttgtcctggggactttgccctgataactgtcccctcgctgctctgacagacccatggctcccagctgcggctccacctcgtctcccctgccgactcaggcgagtatgtgtgtcgtgcagccagcggcccaggccctgagcaagaagcctccttcacagtcaccgtcccgcccagtgaggggtcttcctaccgtgagtatggcagatgccatgggcaaggggggaagggagggccctgaagctaagcccacccctgctgagcccagccctctgcccctttggccccaggccttaggagcccggtcatctccatcgacccgcccagcagcaccgtgcagcagggccaggatgccagcttcaagtgcctcatccatgacggggcagcccccatcagcctcgagtggaagacccggaaccaggagctggagggtgagccaggctggtgggcaggtgggcaagctgggggcaggcatgggggtgccgtcatccccactgtgcaagggtggggcagaagtctggacgccccacattcatggtgtggccctgagtaaggcccttcccgtctctgtatggcaagagcgctggacccaggagtttccaaggcctttgttactttctgctatctgcgactccatgagctagacacacccaggccggagggattggggaagtgggcccaggggcacaggctggcagcaccaagacacgagaaggaccaggtcaatcctctctcaccctcccccatgcaacctcacagacaacgtccacatcagtcccaatggctccatcatcaccatcgtgggcacccggcccagcaaccacggtacctaccgctgcgtggcctccaatgcctacggtgtggcccagagtgtggtgaacctcagtgtgcacggtgaggggacgttgaccctgtggggctctgccctgtttccagccctgattctcagctcagagcctccaagtttaaatcctccttccaccattgactctgtcttgggcattctccctctctgagcctcagtttccacctcagtgcagtggggagacaggtgcccacccagcagttactaagctggaggccatggcagtgtgggtgagcagcagagccctgcctgtgtgtcagtggttgtcattcctccgcacagggccccctacagtgtccgtgctccccgagggccccgtgtgggtgaaagtgggaaaggctgtcaccctggagtgtgtcagtgccggggagccccgctcctctgctcgttggacccggatcagcagcacccctgccaagttggagcagcggacatatgggctcatggacagccacgcggtgctgcaggtgaagccggggctgcctctctgggtctgaggcccagtccatggcccagccttgagcgggtgcttggaggagatagtagtggatgggcaggtggtgatgagtggatggagagaggaagggaggaatgggatgggatgggtggatgacgaatagactggaagatgagagggaagagagaaggaaggtaggagaaggaagaaagaatgagtgggagggtgggtcgaaggccaagtggatggatggactaatggggtgtcatgagggtgagccctcaagcaaccagatgggacagctaaaaaccaaggaaagggccaggcatggtggcacgtgcctgtaatcccagcacttggagaggctgaggcaggaagatcacttgagcccaagagtttgagaccagcctgggaggccaaagtgggtggatcacctgaggtcaggagttcgagaccaccctggccaatatggtgaaaccccgtctctactaaaaatacaaaattaggctgggtgcagtggctcacacctgtaatcctagcaatttgggaggctgaggcgggcggatcacaaggtcaggagattgagaccatcctggctaacatggtgaaaccccgtctctactaaaaatacaaaaaaattagccaggcgtgatggcgggtgcctatagtcccagctactcaggaggctgaggcaggagaatgatgtgaacctgggaggtagagctttcagtgagcagagatcgtgccacagcactgcagcctgggtgacagagcaagaccctcaaaaaacaaacaaacaaacaaaattagctgagtgtggtggcacatacctgtagtcccagctattcaggaggctgaggcgagaggattgcttgagcccaggaggcagaggttgcaatgagccagatggtgccactgcactccaacctgtgcgacagagtaagaccctgtctcaaaaaataaatatataaataagtaaataaatagataccaaggcagggtagaggaaatagggaagaccaagccagagctggggctgacatcagcgtccccactgagtccccacataaccagcctccttgctttctcccagatttcatcagctaaaccatcagatgcgggcacttatgtgtgccttgctcagaatgcactaggcacagcacagaagcaggtggaggtgatcgtggacacgggcgccatggccccaggggcccctcaggtccaagctgaagaagctgagctgactgtggaggctggacacacggccaccttgcgctgctcagccacaggtgtgaccaagggctggcacatagggctggcagggcagggatgccctggggtctgaaatgtagacacatgtgatctagagatgatgtcatgcccaggggtggggagtacggggagaccgtgttgctagcatcccccagtgatggccgaggaacccaactggggtccccatagagggacaggatcacccagggcccttcctcaccatggccaccctctgcgggtccctgaggtagcccagtgacttctgtcatcttccactcgactccacaggcagccccgcgcccaccatccactggtccaagctgcgttccccactgccctggcagcaccggctggaaggtgacacactcatcataccccgggtagcccagcaggactcgggccagtacatctgcaatgccactagccctgctgggcacgctgaggccaccatcatcctgcacgtggagagtaaggcctcatcccttctttgtctgcaccaaatggagatctgagccccccgactaggctccaccccacacagaaccccaggaaccccatccagaggtctccaggcgctgcagggtcctggagcctgccctgcccgacacccacaccctggcctgggacctttgctttccttatccccagtcctctgggctcaccattcagcttccctggacactggatccaacgacctgctgccattctgacctttgccctccccaatcctgacctctgtgtccccccactcaggcccaccatatgccaccacggtcccagagcacgcttcggtgcaggcaggggagacggtgcagctccagtgcctggctcacgggacacccccactcaccttccagtggagccgcgtgggcagcagccttcctgggagggcgaccgccaggaacgagctgctgcactttgagcgtgcagcccctgaggactcaggccgctaccgctgccgggtcaccaacaaggtgggctcagccgaggcctttgcccagctgctcgtccaaggtaagcagccccggctctgcgtggaaggggatcacctttcctcctggccctttgatgacccagctaggcagactcgggtgggaaggcctccctccataaccccacctggaatgccctcatctcccctactctccagggcccgaggcaggcttgccacctccaggaagccctccatcatgtgtgctcagctcctctagctctcacggctgctccccacctttggcacagccctggcactgccaaaggaaaccattctgtgtacataagcaccccagcctgcctcccctgccaggcagtgagaatgctcagggcagggcctggacccaggcatctcagcagccctgggcttaattgagggcaacaaggcccaggatgggctgggtaaatgcttgacagggacaacagtgaatgagtgacaggagcacccaccccagcacgcccagggcttcagtggatcttcagagagcccagcatttccatggcctcctgcatcaatgatacaaatgagggcttttgggccccaaacttaaagcagcacagcatgtagcccactggtcaagagcctggactgtggactcagacctgggttcaaagcacagcttggccatttgctggctgtgcaaccttggccaagtcactgaacctttttgagcctcagtttctttctttttttttttttttttttttttgagacagaatctcactctttcacccaggctggagtgcagtggcatgatctcggttcactgcaacctccatctcccgagttcaagcctttctcgtgcctcagcctcccgagtagctggcactacaggcacgcgccaccacgcttggctaatttttgtgtttttagtagagaaggggattcgccatgttggccaggctggtctcgaactcctgacctcatgtgatccacccacctcagcctcccaaagtgctgggattaccggcgtgagccactgcactcgtcctgagcctcagtttctttatctgtaaagtggagagaacaatgccaaccatgtaggctgagttggaaaggtacacagaggtaaacacagatgtaaaactgtggctcgcagtaggcacttagtaaatggggacagtatgcatcagcccccgcctcccatctgtcccctgcatgtgtaggtgtctttgccatggccaagtccctggattctcttatttaaactgcaggcagaataggctttgctgtccttccttaaaatgtctgagtatggccgggcgcggtggctcacgcctgtaatcctagcaccttgggaggccgaggcaggcagattgcctgagctcaggagtttgagaccagcctgggcaacatggtgaaaccccgtctctactaaaatacaaaaaaaaaaaaaaaattagccaggcacggtggcgcacctgtagtctcagctactcgggaggctgaggcaggagaatcgcttgaacccgggaggtggacgttgcagtgagctgagatcgtgccactgcactccagcctgggaacagagcgagactccgtctcaaaaaaagtattgagtccctcccactcttttcgtggcctgccctccccacccagaagcgaggagctgtggaaacagagcccagcgctccacaggcccttatccatgttggtggaatggcagctgtgtgtgcagatgaatgaatctgccactgaacggtcttttttccctggtcagagaggctatcaggagaacattccttgaatgttgggctgggggtttcctgggtccctggaggggcatcagggacatcacacacacatatacctgcagaacctcatacatgtccccgcaggccctcccggctctctccctgccacctccatcccagcagggtccacgcccaccgtgcaggtcacgcctcagctagagaccaagagcattggggccagcgttgagttccactgtgctgtgcccagcgaccggggtacccagctccgttggttcaaggaagggggtcagctgcctccgggtcacagcgtgcaggatggggtgctccggtgagtggggccgggggcaggactggacttgggcagcatagcccagggctcacagtgagcagagttaaagcacctgccccagggggcgcaacatgaagcactgtccttggacacatcactttacctctctgagcctcagtgttctcagctgtacagtgggttatataagactgaatgaggtccaggcacggtggctcatgcctgtaatcccagcactttgggaggctgaggcgggcagatcacctgaggtcaggagtttgagaccagcctggccaacatggtgaaaccctgcctctactaaaaatacaaaaaattaactgggtgtggtggtgggcacctgtaatcccaactacgctggaggctgaggcaggagaatcacttgaacccaggaggcggaagttgcagtgagccaagatcgcaccattgcactccaacctgggtgacaagagcaaaactccatctcaaaaagaaaaaagactgaaaggagattgtctgaagcacttgcacagtgcttggtgcttggaaggccttcagtaaacagtggcccattcatatttattattagcggaggaaagagaacaggccctggggccagaaatacacaaatgaccccagatctcagctctgctacttgataactgtgtaatcttgagccctagaccataaggtctttgtctaaaatgagtgtggtgccccccaacctgcctgcctacctctagtggttattgggaaactagaatgcaacactgcgtgctgttctacatcagtttttaatgcccacacaattgcaaagcattcttttttttttttttttttttgagatggaatcttactctgtcacccacgctggagtgcagtggcgcaatctcggcttactgcaacctccgcctcccgggttcaagcgtttctcgtgcctcagtctcccaagtatctgggattacaggcgtgtgccaccacgcctggctaatttttgtatgtttagtagaaacagggtttcaccatgttggccaggctggtctcaagctcctgatctcaagtgatgcgcctgcctcagcctcccaaagtgctgggattacaggcgtgagccaccacgcccagcccaattgcaaagcattctatcagttgttttcaactccctgatgtcttattattttttctttatagaatccagaacttggaccagagctgccaagggacgtatatatgccaggcccatggaccttgggggaaggcccaggccagtgcccagctggttatccaaggtaggagggtggcttcaggcctctgctaagagcagggaacagagatgagaaaggcagagaggcacaaggcccagaccctgttccctaggaatccccctaaatgtgtcagaataaagagaattattccattttgccttgcttgtgtctagcatagagtaaaaggggcttgatacatatttcaagggagggaagaaggatatggatggagtgtgtgagtgctcagatgaaccgatgaagattgaatcagtgtgaaccgggcatggtggaacgcacctgtagtcccacctactcaggaggctaagctgggagcattgcttgagcgcatgaattctaggctgtggtgagccgtgatcacacctgtgaatacaaccaagaccctttgtctaaaaaaaaaaaagaagtggacacgtgagtgagtaaatgcataagacctgacaagtgagtgtgtttgtgagtgaatgcatgaaaaagtgaatgaggagtgaatgaatgctggagcttcagtgctcacctttccttgggcagtctatggcctccctcgggccaggcctgcagtgactgatctcactggacctctgcctccctcctccccagccctgccctcggtgctcatcaacatccggacctctgtgcagaccgtggtggttggccacgccgtggagttcgaatgcctggcactgggtgaccccaagcctcaggtgacatggagcaaagttggagggcacctgcggccaggcattgtgcagagcggaggtgtcgtcaggatcgcccacgtagagctggctgatgcgggacagtatcgctgcactgccaccaacgcagctggcaccacacaatcccacgtcctgctgcttgtgcaaggtgaaggccagtggggacttttgttgggggacagtgagtggggcaggggcttctcctgctgccatcttctgcctgcccgctctgctcttcctttctgttcacttgggacattttccattgtgtgtgtttaaggggcaggtttcataacaggtggcagcagcaggggataaaagtgagattcccccagggcagcctggaatgtacagggagagagctaggccatagagcatcaagaagaaaaaagaaaccttgtcctcatctgcagggagtgcctgctctgctgggagagacctgcagcatagtctgagggcagagacataacccagtcaacaaacagacctaatagagagtaaaacaaggacaacagatgcagggcagacacaaacactgtgtgttctttaaaggcaattcctttttaccccaagccctgtgacttgcctccaaacttccttacctatactgcccctagtgtgcacttctcaggtccccaaagggctgcacaattttttgcccaggcatgttgaagaggtctcaggctgtggagtgaaatggatctggccctgaaccctgactctgcccgaccaggagcaaacagccgcttttcccctctgagccataatttcctcatctgtgaaatggaatgtagtggcttccttcaaggggtggtgtgaagatgaaatgaatcagggtgcaggctgggcacatatctgtgactgtcatgttgatggcctatgtctcttccatgcctctcagccttgccccagatctcaatgccccaagaagtccgtgtgcctgctggttctgcagctgtcttcccctgcatagcctcaggctaccccactcctgacatcagctggagcaaggtaagtgctggagagggaaccagcgggcatgacttgggggctgggaacagatctgaagcgtctcagtgtccccaggatgtggcacaggcttggccaagagcaaacgctcaatgttggaaggtgggcctgaggcacagatgggaggtgggcccctggagccgtgggccaaggccagggccctcagtgctagtgcatttgcagctggatggcagcctgccacctgacagccgcctggagaacaacatgctgatgctgccctcagtccgaccccaggacgcaggtacctacgtctgcaccgccactaaccgccagggcaaggtcaaagcctttgcccacctgcaggtgccaggtaagacaccacccctaagaattggcagtgccctgcccactccctgactggcagggtcttcagctgtgctctctgctggcagagcgggtggtgccctacttcacgcagaccccctactccttcctaccgctgcccaccatcaaggatgcctacaggaagttcgagatcaagatcaccttccggcccgactcagccgatggtgagcaggagggttaatttgcggggtgggctggcctgggttgagggacctcgtggagtaactgccatcatggcaggagccctggctgcccctcagtcctgccccaatccctcagccctccctctccagaagcccccagacctctgggcctccaccctggtgtgccttctcttgtgcctcccggcttctccatccctgcctctgtgatatctccagcctcctcgtggctcctctgccaccggggcatcacccccagtcctcctgtcccagcttcctttccccatctctgctccttcctccctcctctgcctccatctcaccctttcctcctctctttctctcgtctcttacgggtctctgactttcactgtccaggcctccttctctactcgggtgagtctctgcctccctctcccccttgagggagactccagtgtgtgtgaagcaaattcagtttctttctaggggcgctcagtaaggcccttgcgtttggggcaccagccctgagatagtgagaaggccctggctgtgtgaggagtgccagagggagggacaggttccgagagtggacaggctcaagagcttgggtggtttctagggtgggggaggacagggagcctgtggctggaagggggccccttacacagtggtgcccacccagggatgctgctgtacaatgggcagaagcgagtcccagggagccccaccaacctggccaaccggcagcccgacttcatctccttcggcctcgtggggggaaggcccgagttccggtgagacccccagcctccccacctacagggggactggacacagggctttggtctggcaagtgctaccctgggctccattatacaaaggagatctggaggaaggagaaaatgtggccgttacccttggtgaccacccaatctgctagagtaggaatagtatgccagtcaggtggaggagggtgcaacctcagacttgggactgctgcaggccaggattcattcattcattcattcattcatgcatgcatgcatcagttatttgctgaccaccccatgtgtgccaggcactgatacaggtaaaacaaaacagaccaaattctggctcttgtgggaagaggtgtattctcactggggaagaataaacaagccataaacagagaaacaaggtgatcacagggagagaggagtcctcagaggaacaaggaggccaggtgctaggctgcagggcgctgagcctggggtccctgtgggctgctctgggaaagctcccagcaaaaggatgtggggagagaagatccaggggatgggtcacggggagggacgacaagacagggacaggaacgggaacagccccagggctgggactgcaggaagtggtgacatccctcctctgggacccctctacccaactgggcccctagcccttcttacaaaccccctatccactctctcctgccccggcctgccccacggagcaggttcgatgcaggctcaggcatggccaccatccgccatcccacaccactggccctgggccatttccacaccgtgaccctgctgcgcagcctcacccagggctccctgattgtgggtgacctggccccggtcaatgggacctcccaggtgagacccaaccccatactgctacttccagccctcatcccgcccttgcccagcctctgttgccattcctgacttccccacctccccagggcaagttccagggcctggatctgaacgaggaactctacctgggtggctatcctgactatggtgccatccccaaggcggggctgagcagcggcttcataggtgagccccctccccacctccagctgaggctgggccttacctggctggctggaagagccctggagagcctgggagggcacctcagggtatgggctgggacaccctgccctgtgctcatcctgcccactcacctcccaggctgtgtccgggagctgcgcatccagggcgaggagatcgtcttccatgacctcaacctcacggcgcacggcatctcccactgccccacctgtcgggaccggccctgccaggtgaccccacaccccacacaccacctggctgccgtggcctccacccctagccatggctggcccctgtggggattatggggggtactgaatgttctcggccttacttctgggggctgctttgcagaatggcggtcagtgccatgactctgagagcagcagctacgtgtgcgtctgcccagctggcttcaccgggagccgctgtgagcactcgcaggccctgcactgccatccaggtacgcaccccgaccgccagtcgctgtcgccccagggcctgcctcttccctttgctgcctccccatatccaccaccatctcaaccactggggcacttccacaccccccactctcacctgagcactctccactcctcccatgtacccatcccccatctctgctacccgaaggccctcaccccatcactgctgcttcccctcctccagccctgctgaccaaattcttaccactaccccgccacccaggcactcccccacccccagcccatcttttttttttttttttttttttgagacgaagtttcgctcttgttgcccaggctggagtgcagtggcacgatctcagctcactgcaacttccacctcccgggttcaagcgattctcctgcctcagcctcctgagtagctgggaatacaagtgtctgccaccacccctggctaaattttttgcatttttagtagaggcggggtttcactacgttggccatggctggtcttgaactcctgacctcaggtgatccacccacctcggcctcccaaagtgctgggattacaggcatgagcccccacgcccggcccccagtcccatcttattacccaggtgcccaccccattacccgccaccaggtgctccccctccaacactgtccagtctctgaagaacctgcagacacacagagtccctcgactgcttcccctgcagtcctccctgtggcctcttctggctcccgccttgctctgctcagttccctcctccaaggcctcccaggaggctggcctggccctcactagcccagccccccggggtgtgatgggcagacctctggcatcaggacccccctccctccagagtcacctccgtgtcttttcactggcctatgtgccccccagaggcctgtgggcccgacgccacctgtgtgaaccggcctgacggtcgaggctacacctgccgctgccacctgggccgctcggggttgcggtgtgaggaaggtgaggggagccaggcctgagacccccagggtcctagtgtcagctggggaggctgggtggggcactctgaggccatgatgggccctacggatgataaaacgattcccaagccagaggatctcgaagtcacctggccacatgtctgcccagcctgagccccttattgagtgagggcccccaaagaggacccctgtcatattggagctcctcccagccccgtgtgcaagggcaggggggctcctgtgccactgcagctggtgccaactggtcctgagcctctgggcctggagagtgaggcaggcaagggtcccagaggaaggcagagtagctggaccccacccgagggtccaggatccccactgcctcagctgagctgtggctgctgcaggtgtgacagtgaccaccccctcgctgtcgggtgctggctcctacctggcactgcccgccctcaccaacacacaccacgagctacgcctggacgtggagttcaagccactcgcccctgacggggtcctgctgttcagcggggggaagagcgggcctgtggaggacttcgtgtccctggcgatggtgggcggccacctggagttccgctatgagttggggtcaggtaagcacccagcaccaaatgcggggctctgcacaccaagccttgtgcccccctcggctcttcaagccccagggaggcatgggaggataaatgcagggatcagggcaagtcccctcttcctgtgcatttcgtctctgtgtcacttgaggccaatccctagccctctctgagccatgggctcctcatctggaatacagaaggctgtagggcattccccatctgctcagggccctgtttgtggtggagagggcagggagccccgtgtgcccccatgtgcccaaccctgcctggcatcctccccagggctggccgttctgcggagcgccgagccgctggccctgggccgctggcaccgtgtgtctgcagagcgtctcaacaaggacggcagcctgcgggtgaatggtggacgccctgtgctgcgctcctcgcccggcaagagccagggcctcaacctgcacaccctgctctacctggggggtgtggagccttccgtgccactgtccccggccaccaacatgagcgctcacttccgcggctgtgtgggcgaggtaagagcagcctcctcgggacaagcgggaggggaggggtgccaagccttgtgtccccctcggctctccaagcaccttggcattgggcccctccacctgcagccacccacgggccctgggccaggacactgtacctctgagcctcagtttcctcctctgtaaaatgggcatgatcacacctactttgaaaggttgggcagaggattgtctgcactgacggatgaatgtttctagcacacagtaggcactcaactcctgcgcctccctccccacaccgagaatccatgctaccactcagggcccaatgtgggctcccagctcccctctgctgcattcttctccctgctggtacacctgggtctctgcctcccaggcccctttagtccctcggtgtccctgtccccacaggtgtcagtgaatggcaaacggctggacctcacctacagtttcctaggcagccagggcatcgggcaatgctatgatagctccccatgtgagcgccagccttgccaacatggtgccacgtgcatgcccgctggcgagtatgagttccagtgcctgtgtcgagatggattcaaaggtgggaaagcctgcccagggcaccggaggggaggggcacaggtggtcagcgacacctccagcccatgcccacccacccactcgcctctgccctggcccacaggagacctgtgtgagcacgaggagaacccctgccagctccgtgaaccctgtctgcatgggggcacctgccagggcacccgctgcctctgcctccctggcttctctggcccacgctgccaacaaggtacccaggcctggcttctctccacttcatctctgtcttggggccccggagctcgacatagtacccacgggtgtctatgcccaccaactggaccctgcccttctccataggctctggacatggcatagcagagtccgactggcatcttgaaggcagcgggggcaatggtgagtacttgccatggcctcctccccagcttcagctcagctcactcttccagttaccccacaccctcaattctggcctgcaagcaaaacagctttatatgaggagcttgctgggcagagagacagaatgaagaccacagccatgtggagctagggcctgccccacacttactggctgggtgaccttgggcaggcctttgaaaccactctgacctcagtttcctcctctgtattcatgtattcagtcaacaaactattgttgcccatccttgccctgagagcagtaaatataagatgcataaagcaagaccctcattcccaagaattccaccgtctactgaaaagctaaggaaacagtgaagagtgaatgctgattgaatgtttacggacactgtgctaacccctttacagacacatctcttcttatgtatcactaatataataggcgaggcagtggtatagtgggtaagagtatagacttggagccagcctgcttgggttcaaatcctagctctcccacttactagctgtggaactttgggtgagtcgcttaacctctctgtgcctcatataaaatggagatgagtaacatctttccctaaagatttggataaaattttatgtgagagtaaaattacttagtgcatttttttttaaggtggagtcttgctctttcacccaggctggagtgcagtggcacaatctcggctcactgcaacccccgcctcccagactcaagcgattctgctgcctcagcttcctgagtagctgggattacaggtgcctgccaccacaccccgctaatttttgtattttttgtagggatggggtttcaccatgttggccaggcctgtctctaactcctgacctcaggtgatccgccccccttggcttcctaaagtgctggattacaggcgtaagccaccgtcctaaagtgctggattacaggcataagccaccgcgcccggccacttagtgcattttaaatgcctagaacaatgtgtggtacagagtcagtacagaatgttagctgttgttaatattatgttcagctggccgggcacactggctcacgcctgtaatcccagcactttaggaagctgaagcgggcagatcacctgaggttgggaatttgagaccagcctgaccaacatggagaaaccccatctctactaaaaatacaaaattagctgggcgtggtggcacatgcctataatcccagctactccggaggctgaggcaggagaatcgcttgaacctgggaggtggaggttgccatgagccaagattgcatgcaccattgcactccagcctgggcaacaagagcgaaactccctctcaaaaaaaaatactatattcagctgggtatggtgactcacgcctataatcccagcactttgggaggctgtggcgggcagattgcttgagcccaggagttccagaccagcctgggcaacaaggcgaaatcctgtctctacaaaaaaatacaaaaagtagctgggcatggtggtgctcatctatggtcccagctactcaggagacaggcaggaggattgcttgagcccaggagttcaagatcaacctgggcaacacagggagacctcatctctacaagaaatttaagaattagctgggtgtggtggcacatggctatggtcccagctgaggcagaaggatcacttgagcccaggaggtcgaggctgtagtgagctacaattgtgtcactgcactctagcctgggcaacagactgagaccctgtctcaaaaaaataaaaaataaggctgggtgcggtggctcacacctgtcatcccagcactttgggaggacaaggtgggtggatcacctgagatcagttcgagaccagcctggccaacatggcgaaaccccatctctactaaaaatacaaaaattagccaggtgtggtggtgcacacctgtagtcccagctactcgggaggccaaggcaggagaattgcttgaacctgggaggtgggggttgtagtgaaccaagattgtgccactgcactccagcctgggccacggagcgagactccatctcaaaaataaataaataaaataaaaattatctatatataatattcattcatagggttgttgtaaggattgagttaaatgcagtggtgtctgtagctggatgggacgctccccgcacagccacatcataggtgttaggtaaatgtcagccgttctcctcatcatttggtggagggtagcagagggtcccctactcttgtcccctgccagagctactgtggccagtgccggcctgtgggatgggtcatgagcagatagggctgggggggtgtggagccacacacagtatggacatcctgggccagtcactcgcccaagcctgcctgctcttctgtaagatggagagaacaccaaggctctgaaccatttattgccacagtccaaggtgaccaacggtcccagtagctccggactgaggggtttcttgggatgtgggactttcagggctaaagccagacagaatttggcaagtagaatggcgggtcacccgacacggatcctgttgactacacaaaataaaataaaataaaatacattgatttaaggaaagcaattatgctgaagtaaagtaatcaaaacatgttttaagtttcctgacttgctatatatgtgcttctttattaacacatcaaataacaagatctggtgatctcagtagctaccacaatttcaaagcagcaatatgtgtaaatgatattttgaaatatttgcagctactgtcatgtgataagcaaatactagtaacaaagttgcaggtcctaccactgctactttggtttcttgcctacatctcattgaaagaactgctcaatttcagtgagaagtgagtgaaattgaggtgtaatgctttcccatccaaggtcataggctccctgaattctgttggcagcccccgtgggtccccagggactgcaggctcggagccccctagtcctgcatgttggcgtggaggtgggggtcaggggaactgacgggggattttgatgcctgatgcagcaggtatggcaccaccctcctctctcccacagatgcccctgggcagtacggagcctatttccacgatgatggcttcctcgccttccctggccatgtcttctccaggaggtgagactggcattggaagggcccatgggcctaatggggaggatgggaatctgggacttctgtcccctcacccgctcttcctccgcagcctgcccgaggtgcccgagaccatcgagctggaggttcggaccagcacagccagtggcctcctgctctggcagggtgtggtgagtgtgggtatccggctgggctcttggggctcctggggcaggaagctggcttcctggtggccggagtggtggggggaggggaaagcagagccccctggcctcggcagcctctgctctccaggctggggaccccagagaccctgtgcttccctggcaggaggtgggagaggccggccaaggcaaggacttcatcagcctcgggcttcaagacgggcaccttgtcttcaggtaggtcctggcacctggcccttcctctcccttccctggtcccagcaccccaccccccggtcctgccccagctcatacttcttgggcctggatgactgcaggtaccagctgggtagtggggaggcccgcctggtctctgaggaccccatcaatgacggcgagtggcaccgggtgacagcactgcggtaagggaccctgccgggcactcgggatggggcccagcgttctggagtggggcaggacgccccctaccatgggcagagaggcaggtattgagctctgtggagacagaacttgaagccaggggaggggagaacccaccagccagggctcgggcttccatctcggactgaactccgctgggggcaggcgagtgccccaggagtgggaggaaacctgggtgcagaaatgaggaagctgtgtttgtggggcccgatctctcgttcagcgggggaaagaaagagcttgggaaacagggacagacttctgagtctggagtctcgatatcagagggaggggactctgtcgtggggccggggaggaccaggaagtttgtggaaaggggcctgacccagttccactgcagggagggccgcagaggttccatccaagtcgacggtgaggagctggtcagcggccggtccccaggtcccaacgtggcagtcaacgccaagggcagcgtctacatcggtaagtctggggctccttctcagggcaggggcaggaacggcactcccttagggctagagctcgcccagccttcctcgcctcctgggctgctggagcccacaggccctgtcctctcacctcccggcaggcggagcccctgacgtggccacgctgaccgggggcagattctcctcaggcatcacaggctgtgtcaagaacctggtgctgcactcggcccgacccggcgccccgcccccacagcccctggacctgcagcaccgcgcccaggccggggccaacacacgcccctgcccctcgtaggcacctgcctgccccacacggactcccgggccacgccccagcccgacaatgtcgagtatattattattaatattattatgaatttttgtaagaaaccgaggcgatgccacgctttgctgctaccgccctgggctggactggaggtgggcatgccaccctcacacacacagctgggcaaagccacaaggctggccagcaaggcaggttggatgggagtgggcacctcagaaagtcaccaggacttggggtcaggaacagtggctgggtgggcccagaactgcccccactgtccccctacccaccgatggagcccccagatagagctgggtggcctgtttctgcagcccttgggcagttctcactcctaggagagccaacctcggcttgtgggctggtgccccacagctacctgagacgggcatcgcaggagtctctgccacccactcaggattgggaattgtctttagtgccggctgtggagcaaaaggcagctcacccctgggcaggcggtccccatccccaccagctcgtttttcagcacccccacccacctccacccagcccctggcacctcctctggcagactccccctcctaccacgtcctcctggcctgcattcccaccccctcctgccagcacacagcctggggtccctccctcaggggctgtaagggaaggcccaccccaactcttaccaggagctgctacaggcagagcccagcactgatagggccccgcccaccgggccccgcccaccccaggccacatccccacccatctggaagtgaaggcccagggactcctccaacagacaacggacggacggatgccgctggtgctcaggaagagctagtgccttaggtgggggaaggcaggactcacgactgagagagagaggagggggatatgaccaccctgccccatctgcaggagcctgaagatccagctcaagtgccatcctgccagtggcccccagactgtggggttgggacgcctggcctctgtgtcctagaagggaccctcctgtggtctttgtcttgatttttcttaataaacggtgctatccccgccaggggcctcctgagtctttgatgagggcttcactcagtggagcctgtggatggggcagagcagggcaggtgagatctgggggtgaagcaagctggcttgggatcagcgaggcccccaggcccccaaccctgtgaggcaggaattgtcctattttctagaggggcagctgagtctcagagggttagggggcctgtccaacatcagacagagagccagggggttagaacccaaagagtctgaccccagagcctagtatcattcccatgtgcccgaagcccctctagggatggcctccctgatcctataaggctgggccactcaactgcagccccctggggagacctggctgggacatgggtagcacgtggtacaggctgtgctgcagtggaggcagaggccacgggcaccaggttgccaggccagccagctgggagagcaacagcaccagaggaggcccaggaggaggccagcagaggccaggagcatcgaggaggccagcgccacccctcagagctgggggcctgtgggaagagaaagtccactcaggcctcggcctgggtcctctgccccgtccccatcacctagagagggacaggtatg

SEQ ID NO: 5 - DNA, 13800 bp, Homo sapiens
atttacatgcgtatggatatgaaaataaatgcatacacatttatgtaaaaaaatttgtacacatgcatttacatatgtaaatacatacatctctatgtattaatgtttaaaaacactcaatttccagcctgctgttttcttttaattttcctcctattccggggaaacagaagcgtggatcccacgtctatgctatgccaaaatacgctgtaattgaggtgttttgttttgttttgttttttgaaatcgtatattaccgaaaaacttcaaactgaaagttgaataacgggcccagcggggaaataagaggccagaccctgaccctgcatttgtcctggatttcgcctccagagtccccgcgagggtccggcgcgccagctgatctctcctttgagagcagggagtggaggcgcgagcgccccccttggcggccgcgcgcccccgccctccgccccaccccgccgcggctgcccgggcgcgccgtccacacccctgcgcgcagctcccgcccgctcggggatccccggcgagccgcgccgcgaagggggaggtgttcggccgcggccgggagggagccggcaggcggcgtcccctttaaaagccgcgagcgccgcgccacggcgccgccgccgccgtcgccgccgccggagtcctcgccccgccgcgctgcgcccggctcgcgctgcgctagtcgctccgcttcccacaccccgccggggactggcagccgccgccgcacatctgccgccacagcctccgccggctacccgaacgttctcggggccagcgccgagtggatcaccggggaccgcgaggcacccgcgcgccgcagaccccgcgcgggctggagcacccggcagagcgcgccacagcgccgtggcctctgctgcccgggctgcgccagagccgcggacgggcgcgcagagcgccggggactccggagccgatccctagcgccgcgatgcggagcacctactgcaggagatcgggggcctgggacgcgctggccgaggtgtgatcggaccccaggctagccacaaagggcacttggccccagggctaggagagcgaggggagagcacagccacccgcctcggcggcccgggactcggctcgactcgccggagaatgcgcccgaggacgacggggcgccagagccgcggtgctttcaactggcgagcgcgaatgggggtgcactggagtaaggcagagtgatgcgggggggcaactcgcctggcaccgagatcgccgccgtgcccttccctggacccggcgtcgcccaggatggctgccccgagccatgggccgcggcggagctagcgcggagcgcccgaccctcgacccccgagtcccggagccggccccgcgcggggccacgcgtccctcgggcgctggttcctaaggaggacgacagcaccagcttctcctttctcccttcccttccctgccccgcactcctccccctgctcgctgttgttgtgtgtcagcacttggctggggacttcttgaacttgcagggagaataacttgcgcaccccactttgcgccggtgcctttgccccagcggagcctgcttcgccatctccgagccccaccgcccctccactcctcggccttgcccgacactgagacgctgttcccagcgtgaaaagagagactgcgcggccggcacccgggagaaggaggaggcaaagaaaaggaacggacattcggtccttgcgccaggtcctttgaccagagtttttccatgtggacgctctttcaatggacgtgtccccgcgtgcttcttagacggactgcggtctcctaaaggtagaggacgcgggccagggcccggggtgggtggtgggtgggagggggatttgggcagccactgcggtagagcccttccttacgtccaggccagaagtaaacagacccctctccagtccacgtgcaacggagccctgcaggggctcccacttccagctgccccgggcgaccgtaagcctcaccctcccggcccgcactcttccacccctctttcttcccctctccctggaatacttttggagctgttaacacttagatgaggtgttttatttatttatttatttatttttaatttttttaaaaacttttttgggtcaaagaaatccctttgagagggtagcccctgggtttcacccgttagctgagaacctgtccgctctgccatggtgatctccattcttcaagtgtttccgggagacttggtttctttgctcagagccgtgtcccatttaggaaagtactaggagtttggggttctccctacttgtttccagaaatgcgaggggtcagtactgaaggatcacttggtactgtgtttttaacagctgacacgtgcattaatagatattcaccatttacgtaatcccgggaagatacatgtgtatcttgactgcactgtggggatgcgggatggagctgcctttcgagacacccctgagggtaggggcctgggacacaagtcataagtggcttcagaagttgtggccttgagcttacagggtctggaagctataagggtgtgtgtgtgtgtgtgtgtgtgtgtgtgtgtgtgtcaggaagttctatacagtgcctctaaggaagtcacatgcaccatttatgtgtgtttatatgccagacagcgctcagcactccgcatttgggtttgtataggggacgcagggtgtcagatcaagcggtggttttcccaggttcccggcattggctgtcagcgctgtgtcacacacaaaaaagtgacagtcattggcgctggtttggttgggggggagggcaaatcccaaatctgatgtcagacgagctaagcgttggatgggagcgataaatcatctggttcaggaacttgggacccttcattatcccaaacgtttgagcttcggtcggtcttacctagactcgtgagtgtgccaagccaggagggcatcctggaggaggcacgccagccaaatgggagaccgggccgcgggggcgcgaggggggaggactgggcggggaactcgggtgactcacgtcggtcctgtccgcaggtcgaccatggtggccgggacccgctgtcttctagcgttgctgcttccccaggtcctcctgggcggcgcggctggcctcgttccggagctgggccgcaggaagttcgcggcggcgtcgtcgggccgcccctcatcccagccctctgacgaggtcctgagcgagttcgagttgcggctgctcagcatgttcggcctgaaacagagacccacccccagcagggacgccgtggtgcccccctacatgctagacctgtatcgcaggcactcaggtcagccgggctcacccgccccagaccaccggttggagagggcagccagccgagccaacactgtgcgcagcttccaccatgaaggtgaggcatggagcagggcgtgggggcggggagtcaccctgcaaagccctccaccgtgggcagactgcagccgtccctgtagaggcagcttggccggggcaccagcggacgtttccactcttgcttctgtactatcgtttctgaatctgattttaactcactgcttgtgtggtgggggagccagggattcccctttagtaactccgcaccctcttcctggcttgcagccagaagagctactcctcctggaagaattggagagaaatcaagtgatggggaagatgagggcaaaaggcatgcctctagtcagctaaacgtgcaagaattccacagagggaaaaggagaaaaagggaggcagattgagatttctttaagtctgtttggaagcttttgctctataaatctgccgcttaagccagggttttagggtagacagagccaagggcagagttttcagagatagtattgaaaaatcaaagcccagggccccaaagtctttctaatttatagttgatctgggcctggtttggaagattttgaatcccaatctaatccccgtgggagatcaatactacaatcaatcttattgtttccacaatgactttcttgtcctgtgcttaaatctgagataggctctgagtagagacaaggcaagccttcagataaaagcgtttgtagcagctgcctgtttttttttcatgtgcaccgaaatgtggatttttttttcttttatgatactacatgtggtttttctaaggtgggatatttctgcttgtttcatcagaagggcatttagtggactggaaatgtcttacagcagctattgaggtctgctgtacctaagttcttagagcaattagtcaaaaatatgttccacttcaattctttttctacacttttaaatgcttctttggcttaatacatttaaaatagagcatgggtttcttcaattcctagaaaagagtacaaaagtgtatatcacagagcaaccacttggcagatatttggggagttgggagtgaagttctctttcttgcctttccctgcttaggtggtaaatttcaagtgggaaatttacactgataatagactaatgggaaatggcacttccagatgttttctcccagtgtgaagggtgacttatacttgtgagagtatttgttggtaatgggaataagtcccaaaggcaagccacatagcagaagatacgttctcattgaggcagctacacattacgacggggacactgaattgatcatcagttcatttacaagcacatttctaagtgaggtgctctctgctagcagaaatcagatttgaaaggcagtaagatctcactccactctttcagaattcatccaatgaaagcagaaatcacctgttgtcatatgtaaaatttgtgtgtatgtgtacattctgccatcttaaccctgaaatgattatagatccagctaatcattcccaggtaatgctgattagaatacttttttttttgtataggaatgtaataagaacaactgttttagacacctcttctggaaatttagcatggaagctctcaactttatttttaaggcctggaagatgctgtgtctctgttacaacttaaaaggaagatcatttaagttagttaacacctaaaacattccattgtgtgaggattttatcagtgatgtctgcatattctcatcattcatctagaagtggtttgatcagaactaaacaggctacacgttattcaactgtgttattttaacttaaaaagcatgcttgagtttataaaatcagaatttatatctttgtgagtgtaaatgttacctgagaaacagtacagaagtgaccaacttgattaaaatcaacttgtaataacttcaggtcttaatgcagttagataatggagaaaagctatgtaattttgccccaaatttcaactaatccatttcttgtctcattatgactaatatatcatccttaatctggatggatatagcacttttttcaagactaatcattgttgtatacacccaggatttgcttttgataaacatccttgtgccatgcatgccacgaaaaaagtttttggtaaaccatgtgatgaaggttgctggctcaagaacagaatttagtttctacagcattaatgagcatttatttgaaaaaagaccataaagacccaatcataagaattacctgttgggttttctttgtaggtgtgatcgaatggtttggtggaattactcgacgagatatcatgatagcattctttcaaccaatatgagtataatgcgaccatatcataggggatctgagacagaattatcagttgtatttttcctattgaattttgtctagtcctttctccagtggcttttatttgggagaatatcagctttgctaaaatgttattgttttcaagatcattaaaaagtgcttcagctacatagacctttggaaactgccattgaacatagaaaagtcagttctgcaagtggaaagagtgttttgtgtattgctgtagttggaaacacattgaaactggttgacttcactggccctccaaaaagtctttatgcttttttgtcagatgggagagagaaagaccaggtgcttcttgttctcctcactctgaaggacacagtcttctttctacatgaaataactggattatttgcctctgtgactgaagctttcaaatagagattaaccctctttccacaaatataattattatgaaaatatccatataatagaaaagttcaagaaataactattgccctgcattagagactttgtggcacaaattcccccgtgcaaacaacagatttggacacatagatccaccaaaaccaatacttacctggtatggttccctagtggccccaggtatttcattgtcattacagaggccacattaagtaggaaaattactctatttggaaatggttgttgagattgaggctttggtgtccagtgatacttccttggcactgacattttccgttccacctgttttttagtggttcccctaaatttctcttaatccctttgcagtgaactattttgcgttcttagacttgctctttgtgtattttcactgagacaataagagaatatttcatcattccgaaggtgttggtgttaagggtgggcagaggccaaatcagggttgttgatgacaaccatgctctctattcctttatttgccattcccttgttgtattttttttaaaatggaatgtttttaaccttttgtatttgatattttttttctccttgatcagttgtctgttattttattatctggaaaatcttatattatactcagcctctttcattttgtgttagggcagtgacttccagccttactgattgccagcatatccccaggttttgttgttgttgttgttgttttactggagattttttagcccaaagtgtgttttaaaatcctcgaagcataacggtaacttacttttttgataaaacttaccatactttatttagaacaaaagggcagccacaaaatagcagtggctccttataaaatagacacattccagtgggccccgtcacttttctgctcatttctgtctgttctgtccatcatacctaagtcatatatttctgttcatttagttgggacagaactcacccaatgttatcattgtactaaatataaatgtgcccctaatggttttgacttttgcttaagtttttgagtcctcatgtatgttaggtagtgccatctagtagccagaaatttgggaactggctgggcatgatggctaatacctgtaatcccagcactttgggaggcttaggtgggtggatcacttgaggtcaggagttccagaccagcctggccaacatggtgaaaccacatctctactaaaatataaaaaaatagccaggtatgatggcccatgcctgtaatccgagctaattgggaggctgagatgggaggactgcttgaacctgggaggtggaggctgctgtgagccaagattgtgccactgcactccagcctgggcaacagagtgagaccctgtgtcacaaaaacaagaaacaaaacaaaacaaaagacaagaaacctgagaagcgcagtagattcaattatatatatctacttttaatttgctagctctgtgaccttaggaaagttacataacctctctgaactgcaactgtttcatttacaaaatggagataatgatagtttttctctaattggtttgttgtgagataattcatataaagctgatggtgccagattacactcaaaaaaagcattcagctgtcattatcattatgacttcttttgttaatgttatagcctttccttctctagggaaaaggaggccagagtggacctaggctgactgagagaattcagctcagtcttttgaattattttgaggtagaggaatgattgatatagtatagattattaaattaggacttcacttttggagaaaagttcagatatcattgttgtcttatttttcttcactttcccacatttttgcagccatagctccatccatttggttaagaacttagaagctcacaaactcgggtcaaagacaggtcgaaatcctcaaatcccttaagaacttcagcttattcaggaagggatatttacagaaaactagcaattgtataagtctccaaaaaagcatacattacttgaggatccatatatttttggcatcctcagggttgctgtgatgatttatagaaggtttgtttatttaatttactttatttcaaataggttttaatttttgtacccttaagaaaagattcgtactcttccctggcagattaaagaaaatgagcgtatattccctaaccttggccagttactttcctgggtttgagggtttctgtgaacgtctaacttacctctgtgacctgtttctgcaaccaggggtgttgcaatggatgcttttgtcttgaggatgggacctttcaagaaacagattcactgaggtgcagtgggaaggtcagagaaagatcttcgtatcgcctattattatttgctcgtctattttttctcctttcttaaggccactaactgattctcctttgctaaggctgcctacttccactgagaccttgaaccacatgaaattgttgttgtctgtgtttctggtcaaatagtggcaattttgtatgattcaatcttgtcatttaattttttgggaggttattattctatttcataccttttttatacccatcttctttacttcatttacctgtccctcatacttgacttgtagcttgtcccttcactgtcatcgtctggccatgtgggtgtgtacgtgtgtgcgagagagagaatgtgtgagaatgtatgtttctttatgcattgggatttagggtttttcttgcaattgtgatttctctgggcacttttgttaatatagctagtcagcgagtgctctagataattttccttgcctccccctctttgaaagaaaagagggtgttcttagatgtattcttatcagataagccagtagctcaggtgctggtctggctttggtgtcattggggtctgaggttgctgacttttaccttctctgctgaaaaattaccttcagcagaaacgtctgaattgcaaggagaaggagaaaaaaacaggccaaacacagtccttggtactccttgggagccactgagaagagtccaggttcaaatggtcagaaggttattttaatgattgtgtctggcctaaagtaccattagcttccagtggagtttagaatgtggatggatcctgaaaggtattccccagaggtttggattaataggcacaagggaaccctaaaggactctattggcctgatactccccatatccacgtagaagagctttagaagaaccttctgttctgagaccctggctgggcccacccagagctggcccattcaactcttactcctttgccaccactaatggttcttctactagtttttatattatttaacaaaaaggcactttaaaaatgcactcctggcaatctatactggaatatgaaaaacatgctgcaaaaccttgacactccaagtgtggtcttacagttcccagaatcccctccttgaggagctgctagaaatgctgaatctcaagcatctccccagacctactgaatcagagcctgcatctgaagctttacggtgtacaagctgttttatgtgaaggctgaagtttgaaaagcactgcattaaagcgttagtttggtataaactgccctgactgaacttggtgtgtccacttagcttgcatgatgactgttgctttgatgatgaaggcttacacgggtagatcctttgagtgagtgatctgacatgattctcctttgctaaggcatctagattcagtgcacaacttacagctgtttgtctttaggggaaatacaactgtaaaattaataaaaacatagtctcttcttatgataacatggaacgatggcaaaatagattttgttagcacttgggtaggaattctgaatgaagcaggcaaattctgttggcagtgaaatgataggatgtggtaaagttagaataaaataaacttaaatgtctcaaactctcatggtatatactaccagtttaataataatgttgtacctttgatgatttgcagactacaagcattcaaggtgctgtgttatatattacttgcttggagaataatacttcttaaaaattgaaattcagaaattttaaatcagacaaagcttttgtgcatggcccacttaaatggctattttgaaataatgatagtggatatagaaggattattctgtaataggatgagactgttccttttgtcatggagatcataatcatatttttgtaaatttttattatttttttggttttgtgtccatcctgcacactattactgggtaggtacatggttttttaacatggtttatctttcaaaactataaaggcattgcaaacagaagacaggtcatttatttttcttccaaaagcatctaaaatgagattttgatatttgaggtcataaagaggtgagagaacagacaacagttgggaaagctatttctcttgaaattgtttggccttaattactacagtgtcctagtaccacccatacgtttccaaagaagtagatccctgtaaatgcctttgtctctggacttttgagtaaaatagtagggtgtgctttgcaaaatgtcatcgttgatgttgagtttcagagtctttaattaggaagctgaaatctgtatatcgagatttgtaaatcatctaaattgcagagtaatgttttagaatactgcttaagggattggcattaaagccttttttaaaaaagaaatgcaataatttcctcaaatcctcactcattagacctctactaactatagtgctgacttttttttttttttaccctaaagtctggaattccaaagaaatgcttcaccatttcccccattattatagccacctggaagcagtattcatgtattagatcaaaaacacaacaaagaattatgaaaggttgtttcctggtatgcaatgcatgatgacatgaacttacagaacagagagaagggaggctccatgtttatttaaagaggaaatttttattttctggttacctacttttacatgggttacatcaaatcccacgatgaggtttaaaaattctcatagataatcaaacgtcattacttggcttactgaaattcagacttttcttttttcttccctgtttttctctatcaaattagaatctttggaagaactaccagaaacgagtgggaaaacaacccggagattcttctttaatttaagttctatccccacggaggagtttatcacctcagcagagcttcaggttttccgagaacagatgcaagatgctttaggaaacaatagcagtttccatcaccgaattaatatttatgaaatcataaaacctgcaacagccaactcgaaattccccgtgaccagacttttggacaccaggttggtgaatcagaatgcaagcaggtgggaaagttttgatgtcacccccgctgtgatgcggtggactgcacagggacacgccaaccatggattcgtggtggaagtggcccacttggaggagaaacaaggtgtctccaagagacatgttaggataagcaggtctttgcaccaagatgaacacagctggtcacagataaggccattgctagtaacttttggccatgatggaaaagggcatcctctccacaaaagagaaaaacgtcaagccaaacacaaacagcggaaacgccttaagtccagctgtaagagacaccctttgtacgtggacttcagtgacgtggggtggaatgactggattgtggctcccccggggtatcacgccttttactgccacggagaatgcccttttcctctggctgatcatctgaactccactaatcatgccattgttcagacgttggtcaactctgttaactctaagattcctaaggcatgctgtgtcccgacagaactcagtgctatctcgatgctgtaccttgacgagaatgaaaaggttgtattaaagaactatcaggacatggttgtggagggttgtgggtgtcgctagtacagcaaaattaaatacataaatatatatatatatatatattttagaaaaaagaaaaaaacaaacaaacaaaaaaaccccaccccagttgacactttaatatttcccaatgaagactttatttatggaatggaatggaaaaaaaaacagctattttgaaaatatatttatatctacgaaaagaagttgggaaaacaaatattttaatcagagaattattccttaaagatttaaaatgtatttagttgtacattttatatgggttcaaccccagcacatgaagtataatggtcagatttattttgtatttatttactattataaccactttttaggaaaaaaatagctaatttgtatttatatgtaatcaaaagaagtatcgggtttgtacataattttccaaaaattgtagttgttttcagttgtgtgtatttaagatgaaaagtctacatggaaggttactctggcaaagtgcttagcacgtttgcttttttgcagtgctactgttgagttcacaagttcaagtccagaaaaaaaaagtggataatccactctgctgactttcaagattattatattattcaattctcaggaatgttgcagagtgattgtccaatccatgagaatttacatccttattaggtggaatatttggataagaaccagacattgctgatctattatagaaactctcctcctgccccttaatttacagaaagaataaagcaggatccatagaaataattaggaaaacgatgaacctgcaggaaagtgaatgatggtttgttgttcttctttcctaaattagtgatcccttcaaaggggctgatctggccaaagtattcaataaaacgtaagatttcttcattattgatattgtggtcatatatatttaaaattgatatctcgtggccctcatcaagggttggaaatttatttgtgttttacctttacctcatctgagagctctttattctccaaagaacccagttttctaactttttgcccaacacgcagcaaaattatgcacatcgtgttttctgcccaccctctgttctctgacctatcagcttgcttttctttccaaggttgtgtgtttgaacacatttctccaaatgttaaacctatttcagataataaatatcaaatctctggcatttcattctataaagtccaacctgtaagagaaaatggtgcatttgtatagcgcttacaatgatgaccttgtgtttgcatttttgtttctgaagttatatattttagagggggtgggggaaaggtaatgaatggctggaaaattgcaggcaagttatttgataagtcatatttgcactaaaggtgttaccagtgatttagtatttttcaaatgaacttctttggggcagaaagatttaagggaaaactaaagcctacaaaacaagcaaaacctggataacccgagataaagtttcagagataatagcccatgcaacagaggcaacggtgccagaaaattagaaagggaaagtgtcggagatcagcttctataagaacatctgccagttggactgacgcccaaacagaatgaagtcaaattaggctgctcagattgaacacttaccagagtgtcagggcttctgtaccctgggttagaatcagaccaaggaagggttcagcagatgttcataagagcagggcacccacaactacccactattttactggcagtattttaggtcagtttccaggactttgcatcccctctgatcctgccatgcatgattggtgaaaccta

SEQ ID NO: 6 - DNA, 19544 bp, Homo sapiens
aatctgtaaattgttccccaaatattcctaagctccatcccctagccacaccagaagacacccccaaacaggcacatctttttaattcccagcttcctctgttttggagaggtcctcagcatgcctctttatgcccctcccttagctcttgccaggatatcagagggtgactggggcacagccaggaggaccccctccccaacacccccaacccttccacctttggaagtctccccacccagctccccagttccccagttccacttcttctagattggaggtcccaggaagagagcagaggggcacccctacccactggttagcccacgccattctgaggacccagctgcacccctaccacagcacctctggcccaggctgggctggggggctggggaggcagagctgcgaagaggggagatgtggggtggactcccttccctcctcctccccctctccattccaactcccaaattgggggccgggccaggcagctctgattggctggggcacgggcggccggctccccctctccgaggggcagggttcctccctgctctccatcaggacagtataaaaggggcccgggccagtcgtcggagcagacgggagtttctcctcggggtcggagcaggaggcacgcggagtgtgaggccacgcatgagcggacgctaaccccctccccagccacaaagagtctacatgtctagggtctagacatgttcagctttgtggacctccggctcctgctcctcttagcggccaccgccctcctgacgcacggccaagaggaaggccaagtcgagggccaagacgaagacagtaagtcccaaacttttgggagtgcaaggatactctatatcgcgccttgcgcttggtcccgggggccgcggcttaaaacgagacgtggatgatccggagactcgggaatggaagggagatgatgagggctcttcctcggcgccctgagacaggagggagctcaccctggggcgaggttggggttgaacgcgccccgggagcgggaggtgagggtggagcgcggcgtgagttggtgcaagagagaatcccgagcgcgcaaccggggaagtggggatctgggtgcagagtgaggaaagcacgtcgaagatgggatgggggcgccgagcggggcatttgaagcccaagatgtagaagcaatcaggaaggccgtgggatgattcataaggaaagattgccctctctgcgggctagagtgttgctggggccgtgggggtgctgggcagccgcggagggggtgcggagcgtgggcgggtggaggatgagaaactttggcgcggactcggcggggcggggtccttgcgccccctgctgaccgatgctgagcactgcgtctcccggtccaacgcttactggggcaggagccggagcgggaagacccgggttattgctgggtgcggacccccacctctagatctggaaagtaaagccagggatggggcagcccaagcctcttaaagaggtagtcgggccggtgaggtcggccccgccccggccccattgcttagcgttgcccgacacctagtggccgtctggggagccgctagcgcggtgggagtggttagctaacttctggactatttgcggactttttggttctttggctaaaagtgacctggaggcattggctggctttgggggactggggatggccccgagagcgggcttttaagatgtctaggtgctggaggttagggtgtctcctaattttgaggtacatttcaagtcttgggggggcctcccttccaatcagccgctcccattctcctagccccgcccccgccaccccacctgcccagggaatgggggcgggatgagggctggacctcccttctctcctccctcgccctcctcctgtctctaccacgcaagccactccccacgagcctgccctcccgatggggcccctcctattctccccccgccctccccctctcaccctgtggtttttatttcacttggcttcagcgccaatgggctgaggttggagttggaagccaccgcggactaaagctttgtttaaattcctgagaactggaaagagttacagcctccctggccaggcgcctcggcgctgtcacccgcgctgatgaggagcaggcgagcttttaaggatttgaggaaagaagaacggggggaggggcgggaagtgaaaaatccaagtgtgcctcttagacccgggggaaaggtggttaagctgggggttgcagtcactactgacaacgcccctcttccgcctgtcccagtcccaccaatcacctgcgtacagaacggcctcaggtaccatgaccgagacgtgtggaaacccgagccctgccggatctgcgtctgcgacaacggcaaggtgttgtgcgatgacgtgatctgtgacgagaccaagaactgccccggcgccgaagtccccgagggcgagtgctgtcccgtctgccccgacggctcaggtgcggctgcgctcggggcctggggcctggggcctggggcctggggcctggggctggggctgggggtggtcggcgctcgctggccctccgtgctggaggcctctgccgacgggagcagcattagcaaaccttggctctaacgcgcgtctcttcgtcccctagagtcacccaccgaccaagaaaccaccggcgtcgaggtaatctcctgccctcgaattttgcccctgcgcggcccgtgactcctcacagtcctcccttctctaacctggcctcttgtttcttctcccccaatcccacagggacccaagggagacactggcccccgaggcccaagggtaagcgttgcactctgggctgtggggggctgcaggtgggcatggctctcggccccacgctcaccccggccccgccctctccccctgcagggacccgcaggcccccctggccgagatggcatccctggacagcctggacttcccggaccccccggaccccccggacctcccggaccccctggcctcggaggagtaagtggagaggccttgtgtgtccactctcccctgttttgtttttgttttttggcagatgacataattttatactttgaaataatttcaaacttacagaaaagttgcaagaatcctacaggaaactctcacatacccttcacagtttgtgacatgtgctttattagtctctgtttatgtatatgtatctttttttttctgaactgtttgagcaagttgctaacatcaggctcttttgcgcctaaatacttaggtgtgtttttcctaaaaacaagagcattctcttaactgacctacacaatgattaaattcactctctaatgtgcagtccgtattcaaagttcaccgatgtcccgataatgtcctttatagattccaccccccaccaccccaatctgggatccagtccaggattatgtattgcgtttaatcatcatgtctctagtttccacaaatgtagaacgttcctcagactttctttgtctttagtggcactgggagttttgatgagtccagttgttttgcagactgtccctcaatttgggattgtctcattagattagatgcagggatgcatctttgcaggaatgtcttaaaagcaatgttattcttctcagcacatcacaccaggaagtgcatgatgtcagtttcttccatcctcagtgccgtcttctgcctttcaattcactgtcctcactctgacttctcttgtttgttctagaactttgctccccagctgtcttatggctatgatgagaaatcaaccggaggaatttccgtgcctggccccatggtgagccagcagggggagcatggatgacagaagagagaatgggtatccagaggaggtgggcataggcggctggtatagacagcttgggaggtccagatcacctttgggacctcagagtccagaaaggatgcaggacgactgggtggtcccaacaggcatgaatgactacatccacatgctttcctacagagggatcaccatgacccccctttcttctccctctatagggtccctctggtcctcgtggtctccctggcccccctggtgcacctgtgagtatccaggacgtcttcatatgcctccttgggctttggtcttttggagggaagactgggatgagggcaggagagatgctcagagatctcttggtaagattggagaaggttgacagggacttgtcttctaacccatctttttccttcttctcaagggtccccaaggcttccaaggtccccctggtgagcctggcgagcctggagcttcagtaagcactctctatacagattcatactccttctacaaacacacagactctcctatagaagaactcccaggcctggggtcttccttacctcttcccttcaatcccagccttccccttctttttttcttatccatattctaaccacctcttctatcttttctagggtcccatgggtccccgaggtcccccaggtccccctggaaagaatggagatgatgtaagtatccccagcaagaagataccatctgaccccatggcctccatgggttgggtcctgcaatttccactccaccacatttgggaacgatactcagaggaaggagggcaagtcctctctgatgcacggactgccctggaacaatgatcttttcgcttagtgagatgattccatgtccccaacaaagtgactgttctcctcaccccagccaccttagagcaatccccaaccccatccctttggggaaattggtgcgcagatggtgaaattaaaatgctggtgacagaagtagacagaaattcctttagaggcactcagatttcaccaaacgaaggtttcactgtagatttaaactgagctctagattcaaagataagattctgggcccccaaacctgacctgcaacaatccaaagaagactgagaccttctccacttttccagcccctaggcggtggtggggaggcagaggcatgatggtcttttctctccctctcagggggaagctggaaaacctggtcgtcctggtgagcgtgggcctcctgggcctcaggtgagcagggggctgtggctgaacctgggcttcactgcacttgggcttcatttaggagctgggtccacagtgatgtgttctaatggcccttccttgtcttcttcatctctctccagggtgctcgaggattgcccggaacagctggcctccctggaatgaagggacacagagtgagtcacctttgagtcatttaagctccccaagtccctagcatacccccatccagtcccaacctcttccccaaaagatactgagttgcatcatggtgggtggcagctacagaagtcccaagggacagagagtggacatccaaaagcacctccctccatgggaaagcagtcccgattaaacgattgggtgagatctagagccagttggggtttagtctagctcagaaacaaagggatggcggtgatgacctcccaaggctctttctcagatctaggtggatgtcaaggctgttccaccccctccacaggttcttaccttctacctctttcctgctttagggtttcagtggtttggatggtgccaagggagatgctggtcctgctggtcctaaggtaagaggctgtctgaacatcatggtcctccacatccccagagtcccaccatgaatgaatttctcactcattattctctgatctacagggtgagcctggcagccctggtgaaaatggagctcctggtcagatggtgagtgtgcccagttccagagggcagggatggggcaggaggcaggggcaagatggaggcctgggggaacaaggctgtctcccatctcatctgacttctcttggtttggttgtcagggcccccgtggcctgcctggtgagagaggtcgccctggagcccctggccctgctgtaagtactcctggccccttgggggatccctgagctctggaaggggctccccaggaactctagggactggccagtgctcagtggacttaacggggcttcccctctctcctgcagggtgctcgtggaaatgatggtgctactggtgctgccgggccccctgtgagtgtggcctgtaggcctcagggcctgggagtggggaggggtctcagtatctgctcttggggctgacaatgggagcaggttatgttggtctgaaccccaggacttcctctgtcccagggtgtgacttgcagctgccatctcttccttctcgctgacatctccatttcattcacagggtcccaccggccccgctggtcctcctggcttccctggtgctgttggtgctaaggtgagaccccccactctcctctaagcatgaccctcatgggccaaggggttcatgtctccctgttccccaaaccaaagggacccagagtggcaagagagcagcccgttcactaacacctttgtcctgggttctccgtctctgatcttagagtcctgatcattgctctcctgtccctgtctccccttcctcctgccatcccgagaggcaaggttgggtttcccagggtggcttctgatatgtcctttcttctgattcagggtgaagctggtccccaagggccccgaggctctgaaggtccccagggtgtgcgtggtgagcctggcccccctggccctgctggtgctgctggccctgctgtaagtgtccccgactcagtgtcccctttgccactttctaacctcagagtccttgcctgttgctgacactcctttctctgtgccacagggaaaccctggtgctgatggacagcctggtgctaaaggtgccaatgtaagtatcctgccaggcttcagtcccactcctgccgcctgcagcctgcctgcccctttccctctgctcctaggctcacgccctggctgtctgcctcccacagggtgctcctggtattgctggtgctcctggcttccctggtgcccgaggcccctctggaccccagggccccggcggccctcctggtcccaagggtaacagcgtgagtaccaaactctcccttctgcccaccccatgcactggctccagtgcggctctcatctggggagcaggaagacgcaggccaactgagcgcccccgactctcagctcatcctcttctccccccttgcagggtgaacctggtgctcctggcagcaaaggagacactggtgctaagggagagcctgtaagtctccccgccatccttcttgcagcccagcccaccctgccctaggagccccctgagggaaatccagaaaggaagaggagcccctagtcttctgggggagtccctgccacacccccaggaacccctgacactggaggcccagcctcagccggctctgaggctggcacaggatggcccctcaccacaggccgcctcctcctctcggccctctccagggccctgttggtgttcaaggaccccctggccctgctggagaggaaggaaagcgaggagctcgaggtgaacccggacccactggcctgcccggaccccctggcgagcgtgtaagtgtccctgcccgccccctcccgctccaccctcattgcctggctggtgcctgtgtgtcgcggagttcactggcctcctctcctcctgcagggtggacctggtagccgtggtttccctggcgcagatggtgttgctggtcccaaggtaacctctccttgcggccggggggctgaccctgccgctccctgggcatcttcttcctcttttggcccgtggcaaagagccacaaacttgagaccctaactgttcctgtgacttcccccaaccagggtcccgctggtgaacgtggttctcctggccctgctggccccaaaggatctcctggtgaagctggtcgtcccggtgaagctggtctgcctggtgccaaggtgaggccccaggctttcagcctggcttggccaggccctgaccatcccgtgtagggtctgggatgaggcgttctggatcaggcccaagggtctgccctctggagtcctcccccacctccatcatgcttctccccaagtcccactcatacctctctgcctccctagggtctgactggaagccctggcagccctggtcctgatggcaaaactggcccccctgtaagtatcactccccctgaaccccctgccattgtcctgtctgcctccctgctgtcctcactgctgctttcgtgcctcccatccttagggtcccgccggtcaagatggtcgccccggacccccaggcccacctggtgcccgtggtcaggctggtgtgatgggattccctggacctaaaggtgctgctgtgagtattaagtgaggatccatgaagagccagggacaaacacacctgagacttgaaggagtcctgggctctgggctcagctgtgccgctgacctgccgtgtggccactcactctcactttctggacctcagcctccctatctgtaaaatgaaagacttctcggcggggcacggtggctcatgcctgtaatcccagcactttgggaggccaaggcgggcagaccatgaggtcaggagtttgagaccagtcgggccaacatagtgaaaccacgtctctactaaaaatacaaaagattagctgggtgtggtggtgtgcacctgtaaccccagctagtcaggaggctgaggcaggagaattgcatgaacccgggaggtggaggttgcagtgagctgagatcacgccattgcactccagcctgggcaacagtgcgagattccatctcaaaaaaaaaaaaaaagaagaaagaaagaaagaaaaaatgaaacacttctccaggctccatgaccactgctctgtcctggaaataagtgttgttggtggccctccaccccgacacgtggggataggacaggcctttgatatgataggcacccccagtcttggtggattctttgaggtccaaaaggagatagcagagaagatgaaagccctttgcagtgcaggccacagcgggcatctaacagggaaaaggcagaggagcctggaagggcatcttgggaggagtgggctcagaaagggcccagcaagaagcacctgcaggggcattccccgggggccaaacagtcttttgaaaagaaagtcccttaaaaagtcccactcagagtaaatgagaggccccaggaggccctggcttctcacttcagccccctcaaccctaactccctttctccacagggagagcccggcaaggctggagagcgaggtgttcccggaccccctggcgctgtcgtaagtatctcctttccatccctacctccttcccattgctgccccggcactttctcctccctgcaggaggggtgctagaggccacggtcctcagctgctcggggcctcctaaccctgagttcccctttgctctctccctgcagggtcctgctggcaaagatggagaggctggagctcagggaccccctggccctgctgtgagtgtccctgatggggagatctggggagcagaaaaggggagacaccctcagcccctcgtctcctcggcctccccgtgactgtagtgttctctctgtgcagggtcccgctggcgagagaggtgaacaaggccctgctggctcccccggattccaggtgaggcctcatggctgtcaggatgctgggaggtaggggtaggaaacacctctttggtctcttccagattctaaaccttccctcccttcttcccccatttcccacctacagggtctccctggtcctgctggtcctccaggtgaagcaggcaaacctggtgaacaggtaagagggagcagccggccagaggggtgggagatgcagggaatccagagggacaggcccccgctcctagctaatcagacagccatcaactagagggattgaggttagacgccggaaagaacttcctcccatgaagggagcagcacagagggaagtgggggctgcatgattgctagtctgggtgacttcttttaagagctgctggaatatgctgtgactttccctcaacccttctattgataaatcttggtccatagtttggggaggggggaagcctttgacacatccctaggaggaagagaggggctgtttgggataatctcaattcagtgctgagaaggggttcctctctaatcacggccagaccccaggaggaaggaccgtgctttccagcagagtggccccaggtgggttttgctcactgtctgttcctctctccctccccctcagggtgttcctggagaccttggcgcccctggcccctctggagcaagagtaagtaggcctctctcgctgcatccgtcaaggtgcgtcgtacttggccctatctccagagcagccttcacatgccctgtccttcccttctagggcgagagaggtttccctggcgagcgtggtgtgcaaggtccccctggtcctgctggtccccgaggggccaacggtgctcccggcaacgatggtgctaaggtgagggcagcgtggaaggggctctggcaagtggcccagggaccaggtctcacccctcctgcagcaggggatggcgggccatgaccaaagccatggagatagggtgtggggtggggggaaaagaccagggcaggggcccacacacagcctggagtctgggctgtgagtcttttcatcttttctcaaggcttgtcgttggccttggaaacaagcctgggagataccaagcggggcttagggctgtgacccactcttggggccccaggcctcactccagtcttcttggttgtcacatagggtgatgctggtgcccctggagctcccggtagccagggcgcccctggccttcagggaatgcctggtgaacgtggtgcagctggtcttccagggcctaagggtgacagagtaagttcaaccttccccctcccctgagccctacatggctcccatctctgcctgctttgaatctctcagcatctctccttctctctgggatctgtccctcttctcgctaatcctcccttcttcccctttcccctctggcctttttgctgatgaatcctctccctgtggtccaggcccatctatccccatgggttaccatggtgatgagaggtgggggcatctccttggtggaggctcccttattcatcccgctacacaagtcaggggcctcttaacctcagttccacctgagtctccaggcaggcaccctttttcctgaaagaatctttgagtccttggcccaggtggaggcagggcagagctgcagagggcctctcaggaaacccagacacaagcagaacactataggtcacctccttgccccacactggaaatctcaagcttatccatgtctttagggtgatgctggtcccaaaggtgctgatggctctcctggcaaagatggcgtccgtggtctgactggccccattggtcctcctggccctgctggtgcccctggtgacaaggtgaggtggccgcctccccaccttctgccctaacacatagcctcctcagcaggcctgggcacggttccgtggggttgcgttgggagagcaggtcctgccaaactgagctgtcaacctgggaacctggagggaccagaaggaggggaggctctcctggggtcatctactaggagtattcaggggaggccctgaccctgagcctcttgtcccttgctctcagggtgaaagtggtcccagcggccctgctggtcccactggagctcgtggtgcccccgtaagtacagaagacctgttaagaccccatacttggcccttccctcccttcacacagcacccctggccctgtctgtgccttcaccccttgcctctcccctcaccgcatccccgccttccctcctgtcagcgcatctctccaatctgactccttttcttctagggagaccgtggtgagcctggtccccccggccctgctggctttgctggcccccctgtgagtaccaagacccccatcatttttcatcaccgactgggacctgggacctcgagggacggaatgaggacaaaggcgtcagccatcctcaggggagaagggtggagacgggattgtttcccacccaagcatcttcctgcctccattactgctcctcccccaggtagtggaaactcctgcctccttccctccattcaccgccctgcttcctcccccagggtgctgacggccaacctggtgctaaaggcgaacctggtgatgctggtgctaaaggcgatgctggtccccctggccctgccggacccgctggaccccctggccccattgtgagtggcttggccctctgtgcccacgaggctggtgggctgggacccaggacgggtccaggcttgatgcctctgtgctctcctacagggtaatgttggtgctcctggagccaaaggtgctcgcggcagcgctggtccccctgtgagtatcacccgcctctctgttgagcctctcccctctccccaggcagcggtggcaggtgagggcagctgggtcggatgagttggctgttctccctctgactgttcctatgttctctccttccagggtgctactggtttccctggtgctgctggccgagtcggtcctcctggcccctctgtaagtctctgcagcagagtccactgctctaggttgggggtgctgggtgggggctgccagaaggatggtggggctgactgaggacccaatgatgcaccagagccccctggagtctgacagcccctcctatcctcatccagggaaatgctggaccccctggccctcctggtcctgctggcaaagaaggcggcaaaggtccccgtggtgagactggccctgctggacgtcctggtgaagttggtccccctggtccccctggccctgctggcgagaaaggatcccctggtgctgatggtcctgctgtaagtgccagctcagatctctgcagctccggaggtgtgcagagctggggaggggtccctgtgctgctctctggcacctcacccctgtttgcctcccaaagggtgctcctggtactcccgggcctcaaggtattgctggacagcgtggtgtggtcggcctgcctggtcagagaggagagagaggcttccctggtcttcctggcccctctgtaagtgcccccctcaccttggggggccctgagaaaaaccatcacaggacttggagtggggcggagccaaggagaacagatttggtagagatgactccagcggactcaagggtcctcccagaccctatctctggcctgactctttcttctcccttagggtgaacctggcaaacaaggtccctctggagcaagtggtgaacgtggtccccctggtcccatgggcccccctggattggctggaccccctggtgaatctggacgtgaggtgagcagtccccagcccccatgccagtaccctcagcatggccattgtggccttgcctaagccctcttccccggctgactctcacttctctctctctctctctgcagggggctcctggtgccgaaggttcccctggacgagacggttctcctggcgccaaggtaagatggcaacactccatgaccacagccttgtctgctgcttccctgccccatcctggcccttcacccggggctgacccatattcccctgctctccccgccagggtgaccgtggtgagaccggccccgctggaccccctggtgctcctggtgctcctggtgcccctggccccgttggccctgctggcaagagtggtgatcgtggtgagactgtaagtagctgggctccagttccctgtacctggtcaggccagggactcttcaggcctccttagaggcctggggatgggtgtcggacttcacccaggcagggggaggaaaggagatcctgcaagatgtcagggccttaatccaaaaaactgagttaaagctcagccccaagtcccctctcccagacaggaccgcctctcccatgagttggccccagctcccgtgaagattgcagtggggaggtttccctgggagttgggagagatggccacagtgggaagcagctgaggagagagagatccagcagaggggaggcctcatcctgcagccccagcctcagccttccctggccaagagctcatgctttccttgctctccccagggtcctgctggtcccaccggtcctgtcggccctgttggcgcccgtggccccgccgtaagtaccctgctgtgtcccccatgcctttagaactctacagatgcagacagtgccccactcgatgccaatggaacttccgcctgacagtttgtccctttctctcttctagggaccccaaggcccccgtggtgacaagggtgagacaggcgaacagggcgacagaggcataaagggtcaccgtggcttctctggcctccagggtccccctggccctcctgtaagtatgctcagcccctccccagtccccatgctgtgctgtgggataggagggggagcttcgcctcagtttccccctctggatagtcattctttcccctccctagtggggactggggtctgaagatttgtgggcatgtccaagtagcttctgagagggtgaggggtacacagagagggattatgggagaggtctctgcctatggacaccctcgggctagatttccagaataatgaaggggcatgggttgcccacactgcccttgtctctccagccaggccctcaggctacatttgacgctcactgggcctgaactgccttttttatctgtccttcagggctctcctggtgaacaaggtccctctggagcctctggtcctgctggtccccgagtaagtcatgccttctctctcctcttcctgagccccaagcccaggctcacctcggggacccttgccagggacccaggcaccctttgcctctctggagaagggttcagggacagggagtgggcaaagagaggaagaatcctgaacaaacaatctgatctagctttggcctctctgctccccaatccgtcctcccctggctcagcggctgggaggagctatggcatgtcctatggaaagaggctgaggctggctctatgagccgtggggccagagccagcagggagggtggtgggcctctcctccagagctggggttgttcgggcttctggcagcctttctcaaaccatttcccccactccagggtccccctggctctgctggtgctcctggcaaagatggactcaacggtctccctggccccattgggccccctggtcctcgcggtcgcactggtgatgctggtcctgttgtatgtagcccctcatcccctctgctcatggccctccagcccccaaagcacttggatgccggtaatccccactctcttccctctctgtgcagggtccccccggccctcctggacctcctggtccccctggtcctcccagcgctggtttcgacttcagcttcctgccccagccacctcaagagaaggctcacgatggtggccgctactaccgggctgatgatgccaatgtggttcgtgaccgtgacctcgaggtggacaccaccctcaagagcctgagccagcagatcgagaacatccggagcccagagggcagccgcaagaaccccgcccgcacctgccgtgacctcaagatgtgccactctgactggaagagtggtgagggcctgccctagcctctccctccctcctactcctgccatgccagggtccccatgcccatatgtgcccctaccatatggtgctggctgctccctttccctgactccatcttgccctgccctaccacaggagagtactggattgaccccaaccaaggctgcaacctggatgccatcaaagtcttctgcaacatggagactggtgagacctgcgtgtaccccactcagcccagtgtggcccagaagaactggtacatcagcaagaaccccaaggacaagaggcatgtctggttcggcgagagcatgaccgatggattccaggtgcgtgagctggacctcagagccagtgttaggagatgggctagcccagtgctcagaagggacatgaagtcctggagtaggtctctgctaagggtgatggacagagctgggctgggaggcaggggtctcaggtccctgatagtggttcagacacaggctgccgatgggcaggtggtgcctcctctcgatataacggtgcattgggcagctctctgaggaccctggacagggaggccaggcaggactagaggttcccgcatagcggctcactcttccctctctcccctcccctgcagttcgagtatggcggccagggctccgaccctgccgatgtggccatccagctgaccttcctgcgcctgatgtccaccgaggcctcccagaacatcacctaccactgcaagaacagcgtggcctacatggaccagcagactggcaacctcaagaaggccctgctcctccagggctccaacgagatcgagatccgcgccgagggcaacagccgcttcacctacagcgtcactgtcgatggctgcacggtgagtgcccagaatccccaggcagggccccacctctccggccttgggctttttggccaggccatagtgccctctctccatcactcccacgtggtaatgccccctcccgttgtctccgccccaccccagagtcacaccggagcctggggcaagacagtgattgaatacaaaaccaccaagacctcccgcctgcccatcatcgatgtggcccccttggacgttggtgccccagaccaggaattcggcttcgacgttggccctgtctgcttcctgtaaactccctccatcccaacctggctccctcccacccaaccaactttccccccaacccggaaacagacaagcaacccaaactgaaccccctcaaaagccaaaaaatgggagacaatttcacatggactttggaaaatatttttttcctttgcattcatctctcaaacttagtttttatctttgaccaaccgaacatgaccaaaaaccaaaagtgcattcaaccttaccaaaaaaaaaaaaaaaaaaagaataaataaataactttttaaaaaaggaagcttggtccacttgcttgaagacccatgcgggggtaagtccctttctgcccgttgggcttatgaaaccccaatgctgccctttctgctcctttctccacaccccccttggggcctcccctccactccttcccaaatctgtctccccagaagacacaggaaacaatgtattgtctgcccagcaatcaaaggcaatgctcaaacacccaagtggcccccaccctcagcccgctcctgcccgcccagcacccccaggccctgggggacctggggttctcagactgccaaagaagccttgccatctggcgctcccatggctcttgcaacatctccccttcgtttttgagggggtcatgccgggggagccaccagcccctcactgggttcggaggagagtcaggaagggccacgacaaagcagaaacatcggatttggggaacgcgtgtcaatcccttgtgccgcagggctgggcgggagagactgttctgttccttgtgtaactgtgttgctgaaagactacctcgttcttgtcttgatgtgtcaccggggcaactgcctgggggcggggatgggggcagggtggaagcggctccccattttataccaaaggtgctacatctatgtgatgggtggggtggggagggaatcactggtgctatagaaattgagatgcccccccaggccagcaaatgttcctttttgttcaaagtctatttttattccttgatatttttctttttttttttttttttttgtggatggggacttgtgaatttttctaaaggtgctatttaacatgggaggagagcgtgtgcggctccagcccagcccgctgctcactttccaccctctctccacctgcctctggcttctcaggcctctgctctccgacctctctcctctgaaaccctcctccacagctgcagcccatcctcccggctccctcctagtctgtcctgcgtcctctgtccccgggtttcagagacaacttcccaaagcacaaagcagtttttccccctaggggtgggaggaagcaaaagactctgtacctattttgtatgtgtataataatttgagatgtttttaattattttgattgctggaataaagcatgtggaaatgacccaaacataatccgcagtggcctcctaatttccttctttggagttgggggaggggtagacatggggaaggggctttggggtgatgggcttgccttccattcctgccctttccctccccactattctcttctagatccctccataaccccactcccctttctctcacccttcttataccgcaaacctttctacttcctctttcattttctattcttgcaatttccttgcaccttttccaaatcctcttctcccctgcaataccatacaggcaatccacgtgcacaacacacacacacactcttcacatctggggttgtccaaacctcatacccactccccttcaagcccatccactctccaccccctggatgccctgcacttggtggcggtgggatgctcatggatactgggagggtgaggggagtggaacccgtgaggaggacctgggggcctctccttgaactgacatgaagggtcatctggcctctgctcccttctcacccacgctgacctcctgccgaaggagcaacgcaacaggagaggggtctgctgagcctggcgagggtctgggagggaccaggaggaaggcgtgctccctgctcgctgtcctggccctgggggagtgagggagacagacacctgggagagctgtggggaaggcactcgcaccgtgctcttgggaaggaaggagacctggccctgctcaccacggactgggtgcctcgacctcctgaatccccagaacacaacccccctgggctggggtggtctggggaaccatcgtgcccccgcctcccgcctactcctttttaagctttttctttctttctttcttttttttcttaaattcttgcttcctcttcccccctcttctccgtcccttctctttcccttcaccttctgcctgctccttcccagaggccctgagaaggcgaggcccggagggaaggtgactgttcggctcccccatctcaggtaagggggacagcgagtgtggtcagcgggggacagagaatccagggcgtcagaagtccagagagaaccaggcacccggagccagggagacagcgagacgacagctggtcacctctctcacctcatctcaggtctaaacccaaaaagaacaaaaagcccgcactcctccctaaggtctccagagagatggacaagtctgtagataccatccatcagcaatactaatatcgtgatgtcattaagtattcatggccgttcattatggccttcaataattcatcattagcacttctaccacacttaggacagtgtagaaagggaatcagtgtagagaggataagaatgatggcatataaatgaaggcttattcatatgcaaattacccaaagttgtgtgatgcctatccatctctctttctctcttttttttgagacagagtctc

SEQ ID NO: 7 - DNA, 14047 bp, Homo sapiens
cgcccggcctaattttcgtattttcagtagagacgaggtttgccctgttgcccaggctggtctgaactcctgggctcaagcgacccacccacctcggcttcccaaagtgctagggttacgggcgagcgtgagtcaccgcgcccacccgggagtctgtatttctaatttgtattcagctctcagcatatcctcaacgtgaccccacccaggttcagggtactggaacctgagcgaggaatgcgtgtgccggggagagtaggtagtgtgaggggccagagtgcaaaggtcagaaggcatctggtggaagcggtgtgcaaagaagcctgaggggaggaccttagatctcggttaccttggcgatctctatcagagggttagagttgccgagaggcgccagctgccgcttcctctctcccgccctccgtttggcttagctcgccgggttctcccacaggttaaaagcagacgccgacgcggttgcctagtgacacttttcccaaaatgcctagggtattgttgtgttcttcttagccaatgagagaggcgaagcggcccaccgcctgccaatagactgcgagatcagggcccgcgacggttaaacggggcccaaggcaggggtggcgggtcagtgctgctcgggggcttctccatccaggtccctggagttcctggtccctggagctccgcacttggcggcgcaacctgcgtgaggcagcgcgactctggcgactggccggccatgccttcccgggctgaggactatgaagtgttgtacaccattggcacaggctcctacggccgctgccagaagatccggaggaagagtgatggcaaggtgagcgtgggacctaccctgcgcctgcccctgcttaggtttcgtcgcctcggggcgagcgccctgcgccaccgaagggaaccgacagggctgaggaaatgggtgcccggaagactaaaccgtctttcctgggtctgcatctgacagcctgtcctgggtggcttaaaggatgggagaccgcttcttttgatatatgtatttccatcttttcccgtttctctccccatttctctctttctcctgctttggcttgctaaggaccttccattggtgacaggtaactaattcctgagctgtttttagagctctaagagtggccctctcaggcacaagaaaggggcaggactaccagaacccgaagctttgtatctgcagtcagactccctcaaaatatccattattaggattattggattcatatttcccaatgtatataggtagaacttttacagaaagtaacattggacaggaaactgcctggctgctgatggagggatctttaccaaggtgtctcatcctgggaaaacacgactggggtggaatggggcagggactttgaccaccttcaccccaattttgactatagtaccttttagccaacttcccactaaccaactgagggtaggggttgggggagtcctcatgtgcctcattcccgtttgtctccccacaacatacatttactgcttagaactggaggaagattatggaagtaaactcacagctccttaagttcattgaactaaattagataatgaccttgattgtaggatataattaaaagggaggtaatttgttaaatcttggaactttcattctttgtttttgagcataatgagttcattcataccttggaaattcttatttcagatattagtttggaaagaacttgactatggctccatgacagaagctgagaaacagatgcttgtttctgaagtgaatttgcttcgtgaactgaaacatccaaacatcgttcgttactatgatcggattattgaccggaccaatacaacactgtacattgtaatggaatattgtgaaggaggggatctggctagtgtaattacaaagggaaccaaggaaaggtaagcataatcttttaaaaatgtaagctgaaattggtctagtttcatttattttaagcatcttgttttaggatcagtaatatggaagagtgtatttgtatttgtttggtaggtccacagtactttagaaaattcctggtgaatcaacacccatattttatatcaaaataacaatttataggctgagtgtggtggctcacacctgtaatcccaacactttgggaggccgatgcgggaggatcacttgagcccaggatttcaagaccagcctgggcaacatagtgggaccctgtttctacaaaaattagccaggtatagtgacatgtgcctgtagtccaagctacttgggaggctaaggcaagaggattgcttgagcctgggaggtcgaggctgcagtgagccatgatcgtgccactgcattccagcctgggtgacagagtaagaccctgtctcaaaaaatataaataaataaataaataaattccctatttgtacactggataatttatatcatcccatcttggcaatgatttttttagaagttatatgctgtataactgctttggttttaggcaatacttagatgaagagtttgttcttcgagtgatgactcagttgactctggccctgaaggaatgccacagacgaagtgatggtggtcataccgtattgcatcgggatctgaaaccagccaatgttttcctggatggcaagcaaaacgtcaagcttggagactttgggctagctagaatattaaaccatgacacgagttttgcaaaaacatttgttggcacaccttattacatgtctcctgtaagtatttcagaatttagctactttttaaaacatcttttatttttgttttcttgtttgtttgtttttgagacagagtctcgctctgttgcccaggctggagtgcagtggtgcgatctgggctcactgcaatctctgcctcccaggttcaaaggattctcctgcatcagcctcctaagtagagtagctgggactacaggtgcatgtcactatgcctggctaatttttgtatgtttagtagagacagggtttcatcatgttgaccaggctggtctcgaactcctgacctcaagcgatctgctcacctcagtctcccaaagtgttgggattacaggcgtgagccaccatgcccagccaaaacatcttttaatgttaagcattctgaagcagggaaattgagttttctgtttgtttagtaatatctagtagccaagaattgaaaatactgttatatttttccacatggaccaccagaccaataaagtctatatcagtttttgtttgctgcatgagttatgtgcattaatgtaagtatgatgaagacagattcctagtctaaggtttgcgccgtttgtcatctctcactgggttcaattttttgagcattcatgcaaattaaagcatattcagttcaagcttttatggaatgactatgatgcattaaactcaaggattacaaaaatgaaatggattttgtccttgccctcaagagttgtttcccaatgtgtaggtcctagttatctgcatcagactcacttggagtgtttgtttaaaatgcagagttctgggtcccaaacccaaacccaaatccatcgagtgaatttcgatctctgggtgggttcttgaactctgtttttttttttttttaatattttactttttattttagactttgcatttaagaggctctgtaaatgattcttgtgtatgcagaatcagagctcaggaagtttgctcacttcagatagcatgtttttacaatgttaactttttgtacattttatttttttgttgcctatccctgaaatatcttgctgagtccactcaccaattacctctattgctggatattttgtttccaacatgtttcaccattcttagaagtactgctctgcatatctttgtatgaattattctttcttcctttttggttatttccttggagtgtagctcataaaatgaaattgctggggtaaatgtttatggctgttattagatattgtctgatggcttttaaaaagtttaagtcaattgtgatagcactaatgtgttagtatataacatctgaacagataaagatgaagaaatatttgttagtattttagtagttcacctttctaggattttccaaatatttataaattatgttaacagatcttactatagtataaaactttgtaaattaatgattttggttttgactaaaaatagccagaacagtaccattttctcactgtatcaaattccaaatagaatgtttttaacataaaggacaattatccagaagtggttcttgggaaatttgaaacctattcttttgttccttttccctcctgcccttgtaattagagtggttcagctttcctaaggcactgattgtcaaaaagtggcatcagactcaccagttggactttaaaacactaaccagccactagagattgcttctattccctctgttgagaataggagctctggtaggctgttgttactgtagatgtggaagaaaggcaaacaataaaataggtaaggataatattagttactactgtgatttatggagtggactaagacaaaatataaatggataattcaattagctatttatgtctatatccatttaaatgtggactagatacatattttgactattcttaaatttcctctagttcttttaaaatggtgtttcttaatttgccttgagagtagaagtctctcatattcacctctgtattgtcagtgcctagtctatactaagcactttcatttgtgaatggaaaatgagtgaatgaattatgtatgatggagtgtattggaacaagatcattgccttttttccattataaatttcaagataaagtataagctaaaaactttgaggttctgtttttatctcaggagtaatttaatgtgttttttaagtttcaaaacaaaataaactcttaacaccttccactttcttaccctttttccctgtataggaacaaatgaatcgcatgtcctacaatgagaaatcagatatctggtcattgggctgcttgctgtatgagttatgtgcattaatgtaagtatgatgaagacagattcctagtctaaggtttgtactgtttgtcacatttcactgggttcagttttttgagcctctgtgctaacgaaagtatattcaagtctgaaagaattgtaccctgggtaaaattaaggtagatagatgaacaggctaaaagaaactattcacaaattaaaactataagccatgaggctgggtcttgactgttcaagggtcttggctggttaggtgctttcttattagattgacacttagctcaagggagagcacataggtcaggcaggtaaggtaaagctactgtaaggatgtggaagaaatgaaacaagactcgggtagaggtctggggatctgtagagcagggaagagctccaattcttttcctttgttcttcttttcattttctttccctttgaaactattctgtagagcagtgattctcaactagggataagggaagcaaatttgcctcttatggggcatttgatgatgtttggataaatttttagttatcacagctggggagtgcttctggcatctagagggtagagggcagggaggctacaaaatacctataatgcacaggacagccccccacaacaaagaattatatgacctcaaatgtcaatagtgccaaggttgggaaacttacttataagaagaaaatcccagaagtagaaacttaaatacaaactggagcttaagctgtgcttttgatttagttcctattgtatattttcatttttacaatttgaaaatgtcttcgtcgtcttcttcttcttttttaaccctaggcctccatttacagcttttagccagaaagaactcgctgggaaaatcagagaaggcaaattcaggcgaattccataccgttactctgatgaattgaatgaaattattacgaggatgttaaacttaaaggtaaagatgataagatgatatattgtctgtttctagctgtcagttaagtgtcagagcatacattctctcttgtagatcaatggagactgaagaaacgttaaatatactttcttagctaaatttactgtgttaacacaagtgaaaacatatgtaaatttggcaaattgcacatccttgctggcccaccttctgcgctttctttatttctcctcccactctgtcatgctaacagatggtcggtagcaaggaaagattgcaaaaagaattcaaattctcgttccccttgtccttgcctacctcacagtggcaggtagtgagggaaggggccagaaataagagtttattactctgcctctagctctaattgagagattaaagaccagaagaaggggaggggtgatggagggcggacggaggacagctaaaaacagagggaaaatcaataaagagattatgtggaaaaactctggctatagaatggggaaggagatgttctggggaccaggctgacataagagaagaaggaaaatgccgtaggatcacagagaaggatacagatgaagtgacaggattgagagtcagtgagagagtatcttgctaaatgtagtttagaaatgcaagggcagtacttcccctaaaacagaccctagcaatgctaccaagccccagcacaagatgtgccaatcttcagggattgaaccttcttagaaaggtgaaaaggggaaaagggaaaaaaggtaagttaacatctgcattaccttgtggacccagaacctcatgagttaaaaccaccagtgaacttatttttccaagtttttaagacctagccataaaggagtcctttcttttgtcttggaaacacatttttgtccttttattttaactgctgtcttaggaggactattctgttatgcaatctgactataatactgagtattttttccccaggattaccatcgaccttctgttgaagaaattcttgagaaccctttaatagcagatttggttgcagacgagcaaagaagaaatcttgagagaagagggcgacaattaggagagccagaaaaatcgcaggattccagccctgtattgagtgagctgaaactgaaggaaattcagttacaggagcgagagcgagctctcaaagcaagagaagaaagattggagcgtaagtctgaatgggggtcaaagcaaaggagaactaccaagtgggttattttgatgtgtctgaatatctctttgagcagaatattttatacatacagatcttattagaagcttttgaaaaatacttgagaaaccaaaatatgtattttagactttttaataatcaggcttgctggcaccttcatgttggacatctttctctgagatcagttgctagttatatattattgggccttaactgtgatggccctaatacgatagccttgtattttactctagagttacttttttctttttcgtctctactgtgaataccctaatgttttcccactgtaaaggaaggtcttaaaattgctgctttccataataaaaaaccatgacttttgtcttttgaaatggccactccaacagaattccaggtctaaaaccctacagtatgtagatgagatatgttcaggcaattcttttctttttttttaactttttatttttgaaaatgagatggggtctcactatattacccaggctggtcttgaactcctgagctcaagtgatcctcccatcttacctcccaaagtgctgggattataggtgtgacctaccacacctggtctgttcaggcagttcaatagagaatctagatacaagatattttaagtctataaataatactctggtgggtattaacattgacttatgagtattaactgattagatgctaatttagttttgatattgaaagtgtgtctactccaccaagatgagagctactcgcaagcatttagggttatgcaaggtagctacagagtgaggttcttcattttaacatcaggagacgagagatggggtcgtatttgtgacctgtcaccctcatgactcacctgattttacttctgcagctttatgcccaatccaggctttaaataatgaaatattgtatagtcctgtgagatatgcttactgtataggtacaacctatacttacttggaaacctctgtaaaaaataagaaagctttttcttataactttccccagtgtttcataatttcttttcttttttttttttgagatggaatttcactcttgttgcccaggctgaagtgcagtggcaccatcttggttcattgcaacctctacctcccgggttcaagcaattctcctgcctcagcctcctgagtagctgggattacaggcgcctgccaccatgcctggctaatttttgattttttagtagagatggggttttgccatgttgacctggctggtcttgaactcctgacatcaggtgatccacctgcctcggcctcccaaagtgttgggattacaggcgtgagccactgtgaccagccataatttcatatagcaactgaaatctgaatactttctgaatttggggccatgaataaatagtaacatttgttattaatactaatcctatgaactaccacctaactgaattgtgttttttttcttttgtttgggtgtggtcattcaaccagaagaaggagatttttgtactgtgaggccagatcatgccctgaaaattagctgttgcttatcttcagtgaagagcagagatagctttagttttttgttttcccaaatgagttactcccacaaaagatgaccaaaggttgaagctaactttgtatttgtttaaacaagtcctttcaagaaaatctaagataacatacagcctactaaaacactcaattaaaaactaacataatcaggttgactgaggcatagtgagaatcctttccccaaacattgcttatcagtatcaggcatgctagtagtgataagattgccaaatgtaaattgttttttagtcaaggtcagttgttaatttttttttctttgtccattctctttttaaagagaaagaacaggagctttgtgttcgtgagagactagcagaggacaaactggctagagcagaaaatctgttgaagaactacagcttgctaaaggaacggaagttcctgtctctggcaagtaatccaggtatgagaatcaacttggtcaacagaagctggtgctacaaatgaagaaatgtgcaccagtgttgctcccaaagtggcttaggtagcccttttcatttacaaatctcaaattttaagatggatttcattgaatatatgcatttcaatggaaacaaaattctgttatagcaatgatttatttcctgggttcatagacctgaggcaatgagtcatagaatttcatgtttgattttctttaccttatcaaactacatgtttagtaattgatacttatttttattatcattatttatttttttattttttttgagatggagtctcactctgtagcccaggctggagtgcagtggcacaatctcggctcactgcaagctctgcctcccgggttcacgccattcttctgcctcagcctcccaagtagctgggactacagacacccgccaccaagcccggctaatttttgtatttttagtagagacggggtttcaccgtgttagccaggatggtctcgatttcctgacctcgtgatccgcctgcctcggcctcccaatgtgctgggattacaggcatgagacaccgtgcccagccgatacttatttttaaaaattagggcatttacaaaactattgtatgtttcagatttcagagagataaactgcatttcaagtaaaaataaacattttaatattgccatgcctcatttttcatagaaagcatggcttaaaaggcatgataagccacctgcagaataggctgtcacgtttggatctttgctaacaccctttcaagttgaaagacatatttgttgaaatttgattgtttaatatctacatatgttctctgcatttccttctttatttaaagtctggtatatagatattcagctttctcagggccctgcctttgtgtggcattgtcccttcactctgccgcactgagatgtggttatcgtatataccagtgaaccattgtctaacattctccattttatagaaaccctcaatctaatttaatcgactctttaagattatgtaaaatgcaaactgtgaaacatctttttgcttgatttatgacacaaactaactgttaaaagttgttggtttcaaaaatcgagcatctgaattttcaataaaatttagagtttttataactcccttattccatgtaggacagcatatatgaaagctattattcccatctttaataaattgagatgtagtgtgatcaatttagtgagcattggcagcattttgtaaatggaacagacaaaaaaccctacttaagttagattgatgatcacaataactttgtagtgaataagtgatggaaagaaatgaaactactgatagaagtaaatgaaacaaggattatatgaaactttggcttcatctctgttaaaataccttcttttttcccaatattgcagtctaccatttcaatattataaaaatatttattctggcttttcatagattccacactgtcatccataaagacaaaatagacttaaatcatgattagggtgataaaatgaggagaaaattttacctggatgaatttcatgcatcaaacccattgcagagaattacttaagaccctgttggggatggctgttcggttaaagagtttatttacatttgccctgatagtctttgagcaaaagatgaaaatagctaagtaaggatgatgtgttttactttataggatacacagataagtatgggaatctacttatatgtgaatcatggcaaatatttaaaatgagccataggaatcaagtatccactggggcaagcagacattttagggtattgagtgctgaaagtagtgaacacatcagagctataagataagcatcatagcagtggggagcgggtaccattctgaactcaggacagttggaaatattctctccccatccttgggctataaaatccacacgtgaggaagccatcacaagtatattgaaatcatcacagcaagcagcagtgtcttttttaaaagctgttcttttcgtatttgatgaaatattcattcttctatttaatggaagaattttaaaaatgtttttaaaacactttctttcttataaaactgtcccattaagagccaagtgtggtgacgcacctatagtcccagctactctggggctcaggcaggaagatcacttaagccgaggcgtccaaggctgtagtgcactacagctgcacctgtgactagccactgcactccagcctggaaaacatggcaagaccccatctcagacaaaaacaaaaacaaaataaaactatcccattagtaagacaatgttgacttacaaatgtaaaggtatttgtggtaataagaaggtggatagagttgaaacagtggagataaggtctaaaagcaatccagtttgctttgaagcagaagcgacgtatgaagcgggaagtcacaggacccttggaaggcagtgcatctgtgtgccagcctttcctatttcttctgcctggagcactcttcatccagacagccctgtggcttcttacttcagaaatgctgtatgaggctttgtatcattacacccagcacccagcacccagcatgtccctgtttccagagctatttttcctaatagcacgtattaccatcaaatattccccaccagtacttgtttgtttgtgtttggtttatctcctcctactagaatagggcctttgtttggttcacagtggcccatcctatgagctcagtaaatattcgaacatatttcctttaacacaaaaaataaaaggattctagaatctgtaagcctccagcccccagtaattctgtcagcagttaatagtgttgccactttaagtaaatatgattattatttattttttccatgtaaagaatagtttacagtttttactactcttacttgatttaccttttccacactgaatttgtttagattttttggaaacagatttctcgtccattaagatgctttgaactaagtgttcttgaacatttaaccaaaactgtaggtgttctctatttaaaaaaaaaaaaaaaaacaaagacagaaaaaaacctctgcttctacacttttctgtaggtaaggtgttctgcatagaatggcacttattttcaaggacagagataaataacattgatttccaaaagttttatgttgtccataatactcagtgtgtttaagagtaaaattgattgttggttgttaagagaataaaacttatgttccttgaattttggcacattccaatattattttttcaatgctgtggattaaaaggctgatttctgcaagtcctacacccctaacctcctatcccagagaaaataaaacaggcacctagatttcaaatgtgagccataagagcaaatactttttgataagtataagtatgaaggagttgaactctgttcaagtaactcagagccctttttctttttccttctaaagaacttcttaatcttccatcctcagtaattaagaagaaagttcatttcagtggggaaagtaaagagaacatcatgaggagtgagaattctgagagtcagctcacatctaagtccaagtgcaaggacctgaagaaaaggcttcacgctgcccagctgcgggctcaagccctgtcagatattgagaaaaattaccaactgaaaagcagacagatcctgggcatgcgctagccaggtagagagacacagagctgtgtacaggatgtaatattaccaacctttaaagactgatattcaaatgctgtagtgttgaatacttggttccatgagccatgcctttctgtatagtacacatgatatttcggaattggttttactgttcttcagcaactattgtacaaaatgttcacatttaatttttctttcttcttttaagaacatattataaaaagaatactttcttggttgggcttttaatcctgtgtgtgattactagtaggaacatgagatgtgacattctaaatcttgggagaaaaaataatgttaggaaaaaaatatttatgcaggaagagtagcactcactgaatagttttaaatgactgagtggtatgcttacaattgtcatgtctagatttaaattttaagtctgagattttaaatgtttttgagcttagaaaacccagttagatgcaatttggtcattaataccatgacatcttgcttataaatattccattgctctgtagttcaaatctgttagctttgtgaaaattcatcactgtgatgtttgtattctttttttttttctgtttaacagaatatgagctgtctgtcatttacctacttctttcccactaaataaaagaattcttcagtttccctgtagttatgtgtcttgcatttgttggtctcttagttgatgggagttgtgtttatgatttgtaggtcttcattgtagggtacagaaggaaacatggatctgatgctcaagggagtggcattccagtcctaaactgtatggcgctttacctcccatctcattaatccatgtatgtaagccagtggtccttaacagggtgattttgctcctcaagagacgtttggcaatgtctgggggcatttttgattgtcatgatttggggtagggtgctactggctgctagtgggtacaggccagggacactgtaaacattttacaatgcacaggacagctgctgacaacaaaatgtccatgggtttggatcataatcctgaatgatacaatctcaaatgcgaaaatcctgaaagaccaaaatccctaatgtcttaaatcccaaaagatcagaatccctaatgtgtgaacttccaaaatcacaatcctgaaagattaaaatcccagatgttaaaatcctgaaagccgaatttgaggttagggattagtgccgtttcagctgtatacaggataattgcatcatgttaggcagaactattaccttgttattgtct

SEQ ID NO: 8 - DNA, 44743 bp, Homo sapiens
ggggaggggggctggcgacgttgaaaagtaacgctaaactatgtaaggatttgataattggggtaagccttttctttaaaacgtctagtaaagaaaacattccaagaaggtctgctagattctgtgactaaacaaggacattaaaaagccctgaatccagcttggtcaacgtagtgaggccctgtctctacggaatttttttaaagttagccaggcgtagtggtgcgcgcctatagtcccagctactcgggaggctgaggtgggaggatggtttgaacacagcagctcaaggctgcagtgagcagtggtcggtgcccactatactccagcctaagggacagagaccttgtctcaaaaaaaagaaaaaagaaaaaaaaaaaaagccttgcgagctctgggggagatttcccgcagcccagctttgccagggacccagcctcacccctcgggctccaccgcccactcccgcccttcacctgacgtgagcgccccgactgctccactccttctcatcccgcgtcgcggtcccgcctattttccctctctcacccatcttttgaactggcccttcacctttcaatcaattcaaatatcgcacggagcaaaccaatcgcaagcctcgttgagtggaaggggtgggatcttccccggaagtgttggttaaagcccctccaatcagcggctcggtgcggcaagtttgaatttcgtggaggctcgggttgtgagggttcctgcttcggagtcggcggtggtcgtccagaccgagtgttctttactttttgtttggttgaggtttcacgctagaaggtggctcaggtaggtgggtgctggagagctggacggagaacactggcccgcttccgttgaaggtctagaagggtctgaggaccgggggctgcgagcgggagcaagtcagaggcaggctcctttaggaccgtgttacctgcccttcccgaagctgataatgcgagcctttagaagagtccatatgtttgccctgacctctgtaatagtcagcgtttcaccaccggggcgtaattgacctttggggtgaaactgttcttcactagctccgacattaaattcccgtagctcttcccaggtcccatggcaactaaaaacgcccggttgagaacctctagtcaagcaagattaacgcattctggactttcaagctggaggaaacgccactcagccaaacaaaatttaggtgtgtgtggagccagggctgccttgcttgggatcccagcttcaccaccttttagatatgctaatgtgagcagttaattgacctcatctgtatgagagcgataatagttaactacctttcagggttattctgataattgtacctttaatgttgtcctcgctcgctctttctcttgctgtggatagtgctatcctgtatttaatacataagtcttaatttttcttcaatctttagcgaattaatattgcaggagataaatagtagaagacagttctttatgaaaagcacagtccattgtcactttccttgggtcttagaggagaatgttattagcatgcaggtcagacagattctcgttttttatattttgttgattgcttagaatcatgtaacaatgtattgcattacttgtgccaatttttctattatctggagttttctagtggatttagttaattcttgttgaagaatataccatagtgtgtctatcacagagcctcccccttacctttttttgtttttgttttttaactgccaagacttctgagaatcagtatcctttctccagtttggcttggtagttctctataccagctacacaggtgaccccctcaaactttctaattttctttgttctccctagttggatctactgacgtcgtctttattgtcctcttttgttttgcttgaatacattctcaaagatctttccaagaaaaaggcatgtgccaattaaactatatgattttgtgcgtgtgtgtgtgtgtgtgtgtgtgtgtatggcttttcttttttaaaatttatagagacggggtcgtgttatgttgcccaggctggtctcaaactcctgggctcaagcagtcctgcctcgacctcccaaagtggtaggattacaggcctaagccaccgtgccggcctaaactgtatgatttcttgtatggatgaaaataatggagcaaactgatagggttattgtgaactatatatttggtcttgttctgttttctggcaaacaactactaaaatccttggagtcttcaaagtggtacctttttgtatgctaatgattgactgatagctggatgcctctaaatagcttcaggattggggctggtcactagacagaccaaggcaggatttctcgagagttggcattttcagccccacctcacaacctctggggaggggagaggagctgaaggttgacttgatcaccagtggtcaatgatttaatcactcatgcttatgtaatgaagctgccataaaaaccaaaaaaaaacacctgtgtttggagagcttcttaggtgaatacatgaaggttcctaaacagtggtgctacctgagagagcatggaagctccttgttcctttccacatactttgccctgtgcctctctatccaactctatctgtatccggttgcctattgattatccctatatgactaataggtacctggtgtggggtttttgtttgtttttggttttcttttggctttagaagaaatgttagactacctgcattcctcatcatgggtaaggaaacccttgtgtacatggtccttcacttaacctattttcacctttatttcacgcttttctttttgcagtgttctctgtggtaagcccagagcctcttttattctggactatcacttactggctttctcttcactggtcaagcaagttcctatttaaaacccccaaataggtagcttcttattctctgataatcttcttctcacttttcagtgttacatatttatttcattgcacattttatatttttatttcagaaggccctgaagtgggacaggaaatgaactgtaatcttaattttttaaataatgaaaattcatgtaagttgggttttgtccttttccttgacaggatgtcttcatcacattttgccagtcgacacaggaaggatataagtactgaaatgattagaactaaaattgctcataggaaatcactgtctcagaaagaaaatagacataaggaatacgaacgaaatagacactttggtttgaaagatgtaaacattccaaccttggaaggtagaattcttgttgaattagatgagacatctcaagggcttgttccagaaaagaccaatgttaagccaagtaagtaaaggtctgttgtaattttaagtactttgaagagtgaataatagttggtttaatgcctgtgtgagtaaaaaactctggccagaagagttttgaaataccattctataaataactttcctttttggtctttttccttttttttttttttttttttttaaattacaagagacagggtctcactgtgtcacccaggcgggagtgcagtggtgtgctcactgtaacctcaaattcctgggctcaaggaattatcttgcctcagcctcccaaagtgtggggattacaggtgtgagccaccgcgcctggccccttaataacctgttatctacaactaactactgtctttaaggcaaaagcctttacctgtggagtattataacactttattatctatattgcttcatagaaatcctaaagttcttacggagcttgggtaggataagtgttgacaagataaattgataagaaatgtaaaaatagaataattaaagaatccatgaaatgagagtactttgtcaatggaaacattagtaagaaaagagcaaagaattcatccttgcagtttgcccagaaggattgggaccattaggatggaaagaaccaactaaagaagaaaggaataatctcagaaaaagatgaaaatagagcatcttagaaggcaaaggatgctacagaaaagagaaagcaaactgagaaatgacttgtgtttagtcaggagtcaccctactcctatttgttgtgttcatatagcaggcgttaggagctagatggcattgaaataatgctaggataaatagggaatggcagaaagaaccaaacattttttatctgagaaagggtggttcctttctcatcttgtcctctcaaatgctccatttcttaaccaaaaatctttcaaattaaagtctaactatctcagtatgctattaaaatatcctttatttcccgtttgcaaaggcttagaggtaggagtgtgcctgatatgttttagtgaatgcaagtaggtaactgggtagaaaagaatgagcaagggagatagattacatagaatcctaaggaccatcattataaggacattggcttttactctgaaatgagaggccattaatgggtgtttatgtaatctgattcatgttttaaaaggatcgctttggagtcaggcctgtagccctagctactccagaggctgaggcaggaaatcttgagctcaggagtttgaagcttcagtgtgctacaatggtgcctgtgaaaagtcactgcactctggcctcggccacacatggagatcctgtctcctaaaaaaaaaaaaaagaaaaggatcaggtcgggcacagtggctcatgcctgtaatcccagcactttgggaggccaaggcgggtggatggcgaggtcaagagttcgaaaccagcctgaccaacatggtgaaaccccatctctactaaaaataaaaaaattagctgggtgtggtgacacacacctgtaatcccacctactcaggaggccgaggcaggagaatcgcttgaacccaggaggtggacgttgcagttagctgagatcacgctattgtactccagcctgggcaacagagcgagactccatctcaaaaaaaaaaaaaaaaaaggatcactttggctgctgtgttgagaatagattatagggtggtatgtatgacatcagggagagcagtaagtagactactgcaataacttagttgatactaaagtattaaaagacaaggggccagatgcggtggctcatacctataatcccagtaccccaggctaaggtgagtggatcacgaggtcaagagatcaagaccattctggccaacatggtgaaaccccatctctactaaaaatacaaaaatcagctgggtgtggcgcgtgcctgtagtcccagctacttgggcggctgaggcaggagaatcacctgaacccaggaggtggaggttgcagtgagccaatcacaccactgcactccagcctgggcaacaaagtgagactccgtctcaaaaaaaagacaagggaaaactagtaaagaaccaaggaacaatgcaaagtaatgtaagaggataaccagaagaacgtgctatcctagaaaccgagtagaaaagtgcatatcgaggagagactgattaactatgttagtcagtactgcttgttagatcaagtataatagaggtgagaatttggacttcaccactgtggaggtcactggtgatcttgaatagttttggtggagtgaggttcagggagtgaaagattggaatggatgagtataatcaaacccttagatataatttgtagtctgtagaaaacatggagcctggaggaatgagtaaataaacaaatacagcttgcaaagacattcaataggaaaactgactaccttttgtcagtaagacaatggcatgaaaagaagagtggggaggaggatctgttttagatgaagagatttaaaaagacattcaaataaaacgtgttgctcttacttggttcttgatttaagtaaacagatggtttaaaagacctctttgaaacaaatagagacgtttaaatctggaccctgtaatagataacaaggaattactgctgattttgttaagtgtgatgatgatatcgtggctatgaaaggaaatgtctttattttattttatttttattttttgagacggagttttgctcttcttgcccaggctggagtgcaatggcacgatctcggctcaccgcaacctctgcctcccgggttcaagtgattctcctgcctcagccttcctgagtagctgggattacaggcatgcaccaccacgcctggctaattttgtatttttagtagagacagggtttctccatgttggtcaggctggtctcaaactcccaacctcagatgaaccgcccacctcagtctcccaaagtgctaggagtacaggcgtgagctatcgcacccttccagaaatgtctttattttttagaagtatatactaaagtatttagagatgaaatcttctaagcataatttgttttaaacaactgcagcaaaatgttcataattattgaatcttggtaataggtatatggggttcattataattgtgtgtatattagaagtttttcataattttgaaaagagagggaatgtaaagagtgttggaaataggctgggcttggtggctcacacctgtaattccagcactttgggatgccaaggtgggtggatcacctgaggtcaggagttcaagaccagcctgtccaacatggtgaaaccccatctctactcaaaatacaaaaattagccaggcgcagtggcgcatgcctgtaatcctagctactagggaggctgaggcagaattgcttgaactcaggaggtggaggttgcagtgagccaagattgcgccactgcactccaacctgggcgacagagtgagactctgtctcaaaaaaggccaggcgtggtggctcacacctgtactcccagcactttgggaggccgaggtgggtgaatcatgaggtcaggagttcgagaccaccctggccaaaatggtgaaactccgtctctactaaaaatgcaaaaaattagctgggcatggtggtgggcgcctgtaatcccagctactcgggaggctgaggcagtagaatcgcttgaacccgggaggccgaggatgcattgagccgagatcacgccgctgcattccagccaaggcgacagtgcgagactctgcctcaaataaataaataaataaaagtgttgatagtagagatacaggtaactctcttgaagaattttgccttaaatgggactagaaaaataagtgctagatgaggatgtaggttgggagaaattaccgcatgcttgtaacttcataatggcaacaattcagtagaggaaaaaatagatgagtaagaggataagttgctggaagaatgtccttgagtaggtgagaagaaatagagtacatctattataataaatagcacctataattgtattagttatcccaaaacttagcagcttaaaacaataaatattgattatttcatacaatttttgtgggtcaggaacttgggtatggctgagctgggtgattctgaagatagcagccaagatgtcatccagagatatatctgaagccttaactgagactggaggatctgcctccaagatgactgactcacatgaacagcaagttgatgctggcttttggaaggaggctgtagttctttgtcatgtggacatctccataggactgcttgagtcttcttaaggccccacatggcacctggcttctcccagagcaagcgacgcttcaagagagagcaaggcaaacactaccctagttttagaagtcatattccattattcctgtaatactctcttggtcacacaagtcagccctattcagtgtgaggggatgacacagggcaagactaccaggaagtgaggatcagtagagggcagcttggatgctggctatcatacaagttaattaatttaaaagtgaagtaataaatgcctattacatagcaagcagttaatatttgaacacatgaaggcaaaatgaatacaaattttaaaagactaggggttgaaataacttgtggttagagtgctaaagaattaacaagaaatattaaaagcatttccctttgtgcggagaggtcttgctttgttactcaagctgaacttgaactcctgggctcaaatgatccttccacctcagccttcccagtagatgggactacaggtgtgttactgtgcctggcttattgaaagcctttttttttttcttgagacggagtcttgctctgttgcttaggctggagtgcaggggcgcaatcttggctcactgcaacctccatctcctgggttcaagcaattctcctacctcaacctcccgaatagctgggattacaggtgaccgccaccacacccagctaatttttgaatttttagtagagatgggatttcaccacgttggccaggctggtctcaaactcctgacctcagatgatccgccctcctcagcctcccaaagtgctgggattacaggcgtgagccaccgtgcctggcctgaaagcattttttagcagcagttgaaatgacacaaaaataattgtttatacatttgcataacttttcatctgaaatgttttatatactgtgtggttttggttttttttctgcctaggggcaatgaaaactattctaggtgatcaacgaaaacagatgctccaaaaatacaaagaagaaaagcaacttcaaaaattgaaagagcagagagagaaagctaaacgaggaatatttaaagtgggtcgttatagacctgatatgccttgttttcttttatcaaaccagaatgctgtgaaagctgagccaaaaaaggtaaatttagtgtcttaatataaaggaatagtttcttttatttggtattttcttcaagacattaagtgactaacccctttcccttagtctcattattaactggttggtagaaggtgggaatgacataatagtagctcagaagaatgaaaatcaggtctcttaagatagctgtaggtaagttgagataggataaaactaggaaaattggtagaatcaggctgaacaatgttatgcaaaggatttggtgtttatcctgtaggttttgcagaatcaggagaagtttataaataagggtagtgccgttgtcaaattaataattcaggaaaataccatagccctaaagattttagtctggaaagggaagcatttatagatagggagaccaattgtgagactattgtaatagaatagatggaaaggggcagtgggttttaaaaggaaaaaataggtgtaagacatctaaataaaggcatttgacaggactggtggccaagtagatggtgaggggtaaaggaaattgaaaaagcagagagaagctctgctgctaaaagagataaggaagataaggaacaagcttaagtgggtgcatgttaataacctttttaaaaatcttaaacttgtgtgggccacctagatattagtaaaaatttggaaagaaggatggaaattggtgctaagatgtcgatttaggatataatattgggaatatggatgagtgtttaagctgtaggactaaatgagaccattccaataaggatatataaaattatgaaaaagtgggctctagagagcacttttaggtaggcagaagccaggtaccaggctgaggactggtcagagaggcaggagaactaagagaggatagaagctcatattaatgatgattccaatacctggaaaatacggtttgaaatttctttctcactgagaaatgtgagtaatttttgaagttactaacttaatttaaatcaagctagaaccagaaaaaggaatttaagtatctttttgctataagagattaaggataaaatttaactttaaaatgggaactttattttgtaataagatatggaagtaaacctttaccagttcatattttaagttcatcttcttttgactgttctaaggctattccatcttctgtacggattacaaggtcaaaggccaaagaccaaatggagcagactaaggtatagttgatagtagataattgttactaaaatgataaattgcacttttttagtaagtaaattcattttaaatctagtatcagattcaaacataatgattaatttactagagttaacaggtaccaaagtcactgtttttagtatggtgatgtagagcaatttcacttaaaatatttgctccaacattccgtatgagatccatggcaaactgtctttgtgtcacactcttgttttgtttagtgggctcctattatgcattccaagttacctgcatgaaatgcatatggggaggaaagcacacagggtaggtgttataaacttacgggtcttcaaaatactgtaatagagatatcaggagggttactaaaacaaagtgaagtgggcaagaagggaaataatatgcctctttatcaggtgaggaagctaagttccacgtatgcatatatattttgcattgctatgatgttcctggtgttgtaggcttttggatataataaactaaattctctttgtggaacttacatgtaaggcatttaaaaaaatacataatatgccagaagatgataagtattatggaagagattttaaaaaggggagatggggtgtactagaaataggtatggggtagaattttgattgggcagttaaggaaggcctccctgagatgaaagccttttgagtgaagtcattatggaagtggagaagagaaccatgggaaagcgctttttatccaggagaagtattttctaggcaaaattaaaaggtcttgaagtgaaagtatgtctaggagtgtttaaggaccttcagaaggcaagttatagtgagctgtttttaatagcttgggttattagcattttccaaattctgtgattgtgaaaaaggatgtaagcttttttggaagcttaatggaaagcttttctttatctcattttatttggggtagttttttgttgttgttgttgggtcatttacgatgatcagatttcatatgaggaatcaatttacagattaaaaatatgatggtctgattcattatgcaattaaatcacatagcacctaatctcttaaatagattgataacgagagtgatgttcgagcaatccgacctggtccaagacaaacttctgaaaagaaagtgtcagacaaagagaaaaaaggtaggaatattagcaattactataaatcctctgaggctaccacagccataattttttttaagtgtcttgaaggtcaactggaatttgttcgtttgtttgtgacagagtcttgctctgttgcccaggttggagtgcagtggcacaatcatagctcactggagcctccacctcctgggctcaagtgatcctcccacctcagcctcctgagtagctgcaactacagacttgccaccatgcccagctgatttttatattttttgtagagacggggtctcactatgttgcctaggctggtttcgaactcctgggctgaagtaatcctcctgcctcccaagtagctgggactacaggcattgcactaccatgcctggcttcacagcaataatttcataactacaagggacatttgatgtagttatttttttttcccacagttgtgcagcctgtaatgcccacgtcgttgagaatgactcgatcagctactcaagcagcaaagcaggttcccagaacagtctcatctaccacagcaagaaagccagtcacaagagctgctaatggtgagaactattccttgatcagtgactgaactagaatgtttggtccttgaggtttttgtgttccgtttcaaaaatcaacaagtacttctttgagtaggagagaaggaaacaggaaattctaatacctgaaaatagattctgtgccctgacatctggttagcacacaatgggtgcccaatcattgaagaccttaattagtataagcagtgtttcaaagtgaaaaattaatggtccgagtaaatcacagttcatttatttggtgcaatacaacgtagccattaagaataatattattaaagaacacttaatgacatggttcatgatatattaagtgggcaaagaaaagcaggtcaaactctgaacagtaggatcgcagttctaaaaagcattatgggaatatgtggacataggactggaaaaccataccctgaagtgacagctgagtaatggaatcctgggtgatttgtcattattgttctttgtagttttctgttatttttctaattgtctgtaataaatatgtacaggctgagcaaccctaatcaaaacatccaaaattctgagcattgacatgaagttcaaaggtcatcctcaaaggaaatgctcttggagcatttcagattttagatatttgtatcaagtatgctgaacctgtaagtataatgtaaatattccaaaatctggaatctaaaatatctctggtcccaagcattttggataagggatactcaatctgtatttggtattcagatgaaaagggtaaaacactctggttttgaaaagagatggtttgtatttggcaggaaattccataaccctttttataatatggcttttaataaaaaaatccttcaagacatatattcctactgttgcttcttttcctttcccaagttacctagtattttcatgtagcatttctatctagtaaaataaatattttattgttgttttagaaaacgaaccagaaggaaaggtgccaagtaaaggaagacctgccaaaaatgtagaaacaaaacccgacaaggtagagaataaacatctttttaattctagatgctttgaaaatctcattgctactttcataaagttgaaattaaacataaagaactgcttcaaaaggttaacctacatgtgtgttaaaacttcctgaaccataagaaagcatcaagaggatttactcttgttatttttcaggtatcttattttcagagctttataggtagagaaagcataattttgttagaagatggagaaaaataataaaaacacagctgagagaaacctgtatgtgggaattagccaagacatagggtgaagtggggtgaaatgcattgactttggattcatttaggcctgggtttgaatactctctctgcttccaattagttgcataaccctgggcaagttatgtagtttatgagcttcttttcttattcctaacatggaatacctgcatagagtagttgtaagaattaaataaactaaaatttctgcctgcatctagcatggtttctaataaggtcttcaaaaaagatgccccatttgaggacccaaccccttggcctataatctatgatatagtttattttcttttattttattttttgagacagagtctcactctgtcgcccaggctcgagtgcaatggcgcgatcttggctcactgcaccttccgctccccgggttcaagtgattctcctgcctcagcctcccgagtagttgggattacagacgtgcaccaccacgcccatctgatttttgtatttttagtagagacgaggtttcaccatgttggccaggctggtcttgaactcccgacctcaggtgatccacctacttcggcctcccaaagtgctgggattacaggcgtgagccaccacgcctggccagtataatttcttaatttaaaaaaagtaccaaagattaagtaacctggctagattcttagtaaaaaatcaaacacagatcaagaaaggaaacacacagtgaatcttcacagataaagcagctggaccttataggtccccccttaagattaacccttaaggattatcactagtttttgctttgactgccatgctggcttcaacagtgttaccacttaaactcttgtccaggttgaaatacctgggtttgagttcatatcttattaaaaatcagaaacctggaaacctctagaaattatttaaataccaagtaacaaattgacttgaaatagtaaatatgctttgtattttatatggttaatcttttgtgtcacattgaaagtattgctcttgtgttaaggttatttataatctaaggttatttaacttaagaatttggtccttaatgatagtcattccataatgttagatttctgattttaaaccattgtaattatcaacataattttttttttgagacagagtctcgctctgtcgcccaggctgaagtgcagtgacacgatctcggctcactgcaagctccacctcccggtttctcaccattctcctgcctcagcctcccaagtagctgggactataggcgcctgccaccacgccccaataattttttgtatttttagcaaagacggggttttgctgtgttagccaggatggtctcgatctcccgaccttgtgatccgcccgcctcagcctcccaaagtgctgggattacaggcatgagccaccgtgcctggccgtaattatcaacataatttaagtaaaaagatacgtatttgttgaataagtttttccatattaattttccattatcttttaatttgttgtaatacccaaaaggtattagttagtctttaaataagaattggttcggggtgggtgcggtggctcccgcctgtaatcccagcactttgggaggcctaggcgggcggatgacgaggtcaggagattgagaccatcctggctaacacagcgaaaccccgtctccactaaaaatacaaaaaattagccgggcgtggtggcgggcgtctgtagtcccagctacttgggaggctgaggcaggagaatggcgtgaacccgggaggcggagcttgcagggagccgagatcgcgcgactgcactccagcctgggcgacggagggctactccgtatcaaaaaaaaaaaaaagattctattcccgggtaatagcaatggatttagcgtaactggtcttctgattccatgtatacacttaattgtatctgtttttgtctctcaaattatgtacatagaacatatatttctgttgtcatattttcagacctataaaaattggttgaatatatcctcagaagagagaaatcttactctactttgttaactcacatcctagggtatttcttgtaaagtcgatagtgaagaaaatactttgaattcacaaactaatgcaacaagtggaatgaatccagatggagtcttatcaaaaatggaaaacttacctgagataaatactgcaaaaataaaagggaagaattcctttgcacctaaggattttatgtttcagccactggatggtctgaagacctatcaagtaacacctatgactcccagaagtgccaatgcttttttgacacccagttacacctggactcctttaaaaacagaagtgtaagaatatgatcttaataataagtctcttgctaagatgggtaataaatgcctttcttttttttttttttttttttttttttttcagacggagttcgctctgtcgcccaggctggagtgcagtggcgtgatctcccctcactgtaagctccgccacccgggttcacgccattcttctgcctcagcctctcaagtagctgggactacaggcgcccgtcaccacgcccggctaattttttgtatctttagtagagacggggtttcaccatgttagccaggatggtctcgatctcctgacctcgtgatccgcccgcctcggcctcccaaagtgctgggattacaggcgtgagccaccgcgcccggccaaatgtctttcttatatttggtctatgctcttaaaaagttattattagtgaactgtgttaattaggaatcatgcaatttttttctttaaaaaaaattcttcagaaggtacaataatgtaattgacagtttttatatttcctatgcattgttattttcactatacaatttgggttttttgtttttaataaatgacttaattataacacatacatttttcaaaagaagaaaattgctatactgctttagctcagatacgactttttcctcattttcttctggcttagtatttagaaaaactggccctgaagacaaaaatgattaatttgcaaaacaagggaaaaatcagttggaacctttaaaagaaaaggcaagatcattttgcaaagactggctggcagcaaatatactaaaaactgctcagcagcatctaagactgttaagtgtttatgttccattaagaaatcttcaaaatctttgaatctgattacaattaattagtaaaaatggacattcacactataggtgtttacattttctcccctccagaatacacattttaaaaaaatagaaacatttctattttagcccagatctacaagtgacacaattttgaaaccctttatattagatatatggagttcatgtttcatgaagtatatttttgctattgtttttagtgatgagtctcaagcaacaaaagaaattttggcacaaaaatgtaaaacttactctaccaagacaatacagcaagattcaaataaattgccatgtcctttgggtcctctaactgtttggcatgaaggtatagtatttaattaatttattcattttttagaataatgttaatacaaaaaatattttgctttcaggtatagtaattacatttttacttttctggattattacttgtcagatttgtttggagctctttttcaccatatcatttggggatgtgaactcagggtcagaaaagacgggaaagcatgggtaaagatatctgaagagaatattggaatgaagaatacagacagaagaggggaaataaatgtaaatttaaagaaaaaatattgagagctactttagaggaaatgtgaagtgattgaggcagaaataaaattttaaaattaaacattgaaaaggatttttaaaatgtctttttaggggctgtcattttaggaattgttgctttgaaatttatatgtaagattttctttaatttatagaacatgttttaaataaaaatgaagctactactaaaaatttaaatggccttccaataaaagaagtcccatcacttgaaagaaatgaaggtcgaattgctcagccccaccatggtgtgccatatttcaggtatgtctgtgtgtttctagtgtaagaattttgtattaatatctagacatttaaaaccaaaactaaaaatttttaaccttaatatagtgggggaaaactggtgttaggtgattttcacgtttaaattttaattatttttttgataactagtacattcatgtggttcctaattcaaagggtaggaaaaggtacaagtgagaagacttcttctcagcactgtgacccaaccacatagtttgaacctttcatgaaggcaagtgttactcatttcttgtgaatacttccatggatagttcatgcatatgtagacaaatataacatgtacatttttttcttttttaaaaaatatggacaataggctgggcgcggtggctcacgcctgtaatcccagcactttgggaggccgaggtgggtggatcacaaggtcaagaaatcgagaccatcctgtctaacatggtgaaaccccatctctactaaaactgtaaaaattatccgggcgtggtggtgcacgcctgtagtcccagctactcatgaggctaaggcaggagaattgcttgaacctgggaggcggaggttgcagttagccaagattgcaccactgcactccagcctggcaacagagtgagactccatctcaaaatatatatatatctatatacatatatatatcggggaatctgccctgatattcacgtaggttcttttctgttttccttaagcattggccagcttgagaagtaaagggacagagtacaaaaagaaattttaaagctgggcatccgggggagacatcacatgtcggtaggttccgtgatgccccacaagctgcaaaaaccagcaagtttttattagggattttcaaaaggggagggagtgtgcgaataggtgtgggtcacagacatcaagtactttacaaggtaatagaatatcacaaggcaagtggaggcagggtgagatcacgggaccagggcgaaattaaaattgctaaatgaagtttcgggcaccattgtcattgataacatcttatcaggagacagggttttgagatcaaccagtctgaccaaaatttattaggcgggaatttcctcttcctaataagcctgggagcgctatgggagactggggtctatttcacccctgcagtttcgacagtaagagacggccacgcccagggggccagttaagagacccacccccaggtgcgcattctctttctcagggatgttccttgctgagaaaaagaattcagtgatatttctcccatttgcttttgaaagaagagaaatatggctctgttccgcccggctcaccggcggccagagtttaaggttatctctcttattccctgaacaatcgctgttatcctgttttttcaaggtgcccacatttcatattgctcaaacacacatgctgtacaatttgtgcagttaatacagttattacagggtcctgaggtgacatacatcctcctcagctgacaggattaagagattaaagtaagtaaagacaggcataggaaatcacaagggtattgactggggaagtgataagtgtccatgaaatctttacaatttatatttagagattgcagtaaagacaggcataagatattacaaaagtattaatttggggaactaataaatgtccatgaaatcttcataatccacgttcttctgccatggcttcagccagtccctccgtttggggtccctgacttcctgcaacatgtatatatatatatagagagagagagagagacaacatatatctatagagagagacaatatcatacaatacacactattctgtttgcaaatcaaatagatgagaagtaagtatctcattatagttttactattcatttgttctattataaatatactttttgagagtgacttcatttctttcttttcttttgttttgaaatggttgcactctgttgcccaggctggagtacagtgatgtgatctcagctcaccgcagcctctctgtcctgagctcaagccatcctcctgccagtgggtggctaattttggtgtgtgtgtgtttttttttttgtttttttttttttttgtagagacgggggtcttatgatattgcccaagctggtctcgaactcacaggctcaagcgatccttttgcctcagcctcccatactgttaggattacaggcatgagccactatgtccagcttaatttcttttttagagcactgggttttagaattataagggattttagaggtagctaatccattgtgtcattccactgagttattgaaatattaagcaatctacctaactagataatgtcagaactaaaccatttctgctatctcttctttttttttttttttttttttttgagacggagtctcgctctgttgcccaggccggagtgcaatggcgcgatcttggctctttgcaacctctgcctcccaggttcaagcaattctcaggcctcagcctcctgagtagccaggattacaggcgtgtgccaccacacccagctaatgtttatatttttagtagagacggggtttcaccatgttggtcaagctggtctcgaactcctgaccttgtgatccgcttgcctcagcctcccaaagtgctggtattacaggcgagagccaccgtgcccgaccctctgcctccttattaatcgtcatgttgtgtcattgaatatgaacaactcaaattttttgtttttgtttctgttttttgagacagggtctcactctgtcacccaggctggagtgcagtgtctcgctcttggctcactgcagccttgacttcccgacctcccacctcagcctcctgaggagctgggactatgtctgtttctagcgtaagaattttgtatttaaaaaaaataaaaataaagaattttgtactaatatctagacatttaaaaccaaaactaaaatatttataaccttaatacagtggagggaaactgatgttaggtgattttcatttatcttttaaatacttttttttttttttgtatttttttttttaagtagagattggttttcgccatgtttcccaggctggtctggaactcctaggctcaagtgatctgcctgcctcagcctcacaaagtgctggctggaattacaggcatgagccactgagtctggccctaaatttttttttttttttttaaagaaacaaaacctgccgggttcggtggctcccacctgtaatcccagcactttgggaggctgaggcttgcagatcacctgaggtcaggagttcaggactagtagcctggccaacttggtgaaaccccatctctactaaaaatacaaaaattatctgggcgtggtggtaggtgcctgaaactctgtacctactaaaaaataactccccattcctcagccattccctcctagcccctggtaaataccattctactttctgtctctgattttgactctgctaagtatcttatttaagtagaattatgtagtatttgtcttgttttactggcttatttcacttagcataatgtcctcaaggttcattcattgtagcatgtgtcagactttcctttttaaggccgaataatatttcattgtatgtatataccacattttgcttatccctttgtctgtcagtggacacttgggttgcttccatgttttaactgttgtgaacagctatgaacatgggtgtacaaatacctctttgagaccctgctctaaattatcttgggtgtatacccagaagtagaattgctgggttgtgtggtaagtctatttttaattttttgaggagctgccatactgttttctacagtggctttgccgttttacattcccatcaacagcatacaagggttccagtttctctacatgctaggatactttttccatagacacaaattaaacttcttttaggcctgggtttctcaatcttagcattattgacattttagattgtatacttgttgtgggtatatatcctatacatcgtaggatgttttgtagcatccctggccagtagcactcctccagtcatgacaatcaaaaatatttccaaacaccaccaaatgttccctagaatggggcaaaattgacccagttgagaaccactacctttaagcaagcaaagcctaataattaggatctgtgaggccccatcactataatcctgggattaacagtttttagctttaatttactcttgacagttgagttggctttagtttcatagacaatgctgagaatctgatgcacatttaggaatgtctgactttgatcaacctctgaaaaagaacagaacaaactagaaatgttagcttaaaaagtaggttcttggtattatccagccacataagttttaggtataaaaggatgtacatacaaagggtatcaacttgtatttatggattttaatatatcacagtttataaataattcagtatcaactttgggaaaatattgtggctcccttttataacttcctaatgttatgtatcatgatgttatgctaatacttagctactagtgtaaaaaccacttgtagaactgaaatgtatgtcataattttagaaatatcctccagtcagaaactgagaaattaacttcacattgcttcgagtgggacaggaaacttgaattggacattccagatgatggtgaggcaacatttgtattttttgtttgctttgtttcttttactatggttacgtttatctgaaacataaaaatatagcattgcctaactttattgtttcattatcattcaaagtagcaagaattttttcttttttaacttgatgtctacaataaagtagcaagtgtttttcatatctcaacatatgttccctaacatctgtgctaaaatggtatataacttaaaagatgtaagtaattagaatattgactgtcgttcctttgacttagacatttttctaaccaaccaagcaagtaacagtgaatattattagctttttaaatatgactttatgggtgatatcaattgatatctgatattgtttacacaaaaatatactctgaatgaaaattacctaaatcaatatggaaaagattttctgaagagtttcttaatctgatttatttgggaagctgtttagaaaaaattatgtgctgtcagtatgaagtccttcttagataattatttgcagtgagttgtttgacgttgagttttttttttttaatttatttattattattattattttaagatgagtgttgctcttgttgcccaggctggagtgcaatggcgccatatcggctccctgcaacctctgcctcctgggttcaagcgattctcctgcctcagcctcccaagtggctgggattataggtgcctgccaccaggcccagctgatttttgtatttttagtagggatggggtttcaccatgttggccaggctggtctcgaactcctgacctcaggtgagccgcccaccttggcctcccaaagtgctgggattgtaggcatgagccaccgcgcccgcaggcatgagccaccacaccggctgacgttgagttcttataaagtacaacaagaagtagaatgctatttagtatatagcaatatgtatgagaaaatattgttaattttgagcaggaattgaagcaaatagttagtactcagtatttgtatgacaaagttttgtggtagatattttttgttttgcttaacaacctgtaggccctaggatgtttggagtgaagtcttatcagtgggctgacttgcaatgaatgtcccgttttgtcctttaattttaaaaaatctcttatttccttcagctaaagatcttattcgcacagcagttggtcaaacaagactccttatgaaggaaaggtttaaacagtttgaaggactggttgatgattgtgaatataaacgaggtataaaggagactacctgtacagatctggatggattttgggatatggttagttttcaggtatgtggttcaatatttcaaatatattaacttagggcttttttttttttttttttaagtagcaggagtaaaatggggtaatagtagctgcttatgtacctgtaatattaaataagatgttataaagcactttgataaactgtaaaacatgatctaaattttatgactgatgtcctcttctcccatatattctcaggataattttttttttttttttttttttgagacggagtctcactctgtcacccaggctggagtgcagtggtgtgatctcggctcactgctgtctctgccccccaggttcacaccattctcttgcctcagcctcccgagtagctgggactacaggcgcctgccacctcatctggctaattttttgtatttttagtagagacggagtttcaccgtgttagccaggatggtctcgatcttctgacctcgtgatccacccacctcggcctcccaaagtgctaggattacaggcatgagccaccgcgcccggccaggataatttctatataggttgaaaactgaaattattttcaactctttaatagtctataatgattcgacctgtgagaaatgagtcaactggcctttggtagttgagttcagctaacagttactgagttcctgttgtgtgcccgtattgtattaatctcttattgtgttaggagtattgtattaggagttgataaaatagtgcattccctgtcccagaggagtttgtaatttgattagtgactgagatacaaaatataattctaacatataaattgctgtgatagaagaagttactaggaagatcagtaaaggtatgggggaagatgactctagcgttttgaacttattttagaaataagcatataaaatagcatttcaagaaccaacagccaacaatagacattgaaaaaagcttcaaacctaaaagaaaaaggccaaagcaaacatctaggaagagagctatttggatggacttttaaatgcaagtattcatattctcaaagagaccagacgtttcatctgtcaagtaaaaatacctgttagaaaaagaacattcagagaataaatagctctttgaagttaagcaatatgagaacagaaatgtaagatacaataggtagaatatgaagttaaggaaatctcagccaggcacagtggctcaagcctgtaatcctagcactttgggaggctgagatgggaggatcacttgagcccaggagttcaagaccagcctgcgcaacatagtgagagcccatctctacagaaaataaacttagccaggcatggttgcacatgcctgtagtacaagctgtaagacagaagagattagataagaaaattacatggaccagtccaggaaatatagccaaattataggaattccagaaaaagagaacagaaaaaaaaattggggagcaagtgaacaatgaaggagcctgttgagtgtttagcactgagtagacccacagcaacttacataattagatactgttatgtaactctgggataaagagggtaggctaaagcatccagggaaagaaaacaaattttatacaaagcatcaatggttagagtagcattgatctctcaacagcaatattatgaactagaacaatactctgaaaattctgagggaaattaacttccaacctggatttctataccgaaccaatcaagcatgagggtggaaaggcaattttcagacacacaagatctcaaagttcacctccttccatgtaccctttctcaggaaaatgagaatgtccttcacaaagatgagagagttacccaagaaaagaggagagtgggctccattcccagaaagaggcgagaccctgtctcaaccaaaccaaaaccctgagcaaacaaaaagcaaaacaattattaagtctaaagaaaacgttgtgaggaaggaaatggaatctcagcagctgtatggcccagacatgaatagtgtttagtcataattaagcattactttatgatgagtttttatatatttaccagttttcataatagttggttcactagcacccttcaattctgattgttagattctgtggtgatttttgtatcattattagttgcagatttaaaagtatgatatgtttacattgtttatagtcttttttttttttttttgagatggagtcttgctttgtcacccaggctggagagcggtggcgtgatcttggctcactgtaacctctgcctcctgggttcaagcgattctcctgcctctgcctcccgagtagctgggattacagatgcccaccaccacgccaggctaatttttgtatttttagtagagatggggttcgccatgttggtcaggcttgtcttaaactcctgacctcaagtgacctgcctgcctcggcccccaaagtgctgggattacaggtgtgagccactgtgcctggcctatagtcattatcttgactgatgctcatttcccagctttggcttagtgggagccacttcaagttggccattggggcacttttttttttttttttaaacacaaaagagctatatgaggtataatttacatatgataaaattcattcatttgaaatgtacagttcaatcatttttagtaaatttacagagttatgcaaccatcaccacaatccaaatttagaatatatatatgtatttttttttttgagatggagtttcactcttgttgcccagactggagtgcaatggcacaatctcagtttactgcaacctgtgcctcctgagttcaagcgattctcctgcctcagtctcccaagtagctgggattacagtcatgtgccaccgtgcctgtctaattttgtatttttagtagagacggggtttcaccatgttggtcaggctggtcttaaactcctgacctcaagtgatccacccgcctcggcctcccaaagtgctgggattacaggtgtgagccagtacacccagccagaacattttcatcagtataaaaagatgcctcctgcctgtttgcagtcaatccccatttctactcctagacctaggcaaccactaatctacttactgtctctgtagatttgcctttttttgggatatttcatataaatagaatcataccttatggtggtcttttgcatctggcttctttcacttagcatctttctgagttttatccatattgtagcttgccttgtgtacttcacacctttttactgctgagtggttttccattgtatggatatatcactattcaccaattgatggtcatttaaattgcttccactttttggtgattatgaataacctgtgaatatttccacacaaatcttagtgtggatgtatctttttaaatttctcttgggcagatgcctagatattggtaggtcatattgtaaatttatgtttaactttttaagaaactgcccaaactattttccaaagtgattataccattttacagtcccaccaacaatgtatgagtgttctgtttttcgacatcctcactaatacttattgtcttttttattatagtagcccccccttatcagcagtcttgctttctgtggttttagttacctgaggtatagtacaataagatatttggcagggaggagagaccacattcatataacttattacggaatattgttataattgttctattttattgttgattgatgtctatgcttaatttataaatgaaactttatcataggtatgtatgaataggaaaaaacatatatatagggttcagtactatctgcatttcaggcatcccctgggggtcttggaacagattctttgaagataagggggaattgttgcatagccatcctagtgggtatgaggtatctcattgtagggtttttttggggtttttttttttgttttttaagtcagggtctcgctctgtcaacccaggctggagtgcattggcacaatctcacctcactgcaacctccacttcctgggctcaaacaaccctcctgcttcagcctcccaagttgctgagactacaggcatgtgccaccacgactggctaatttttatatttttttgtagaggtggggtgtcatcatgttacccaggtggccaggtcttactcctgagctcaagcgatccacccttctcagcctcccaaaatgctaggattacaggtgtcaccatgcctgacctcattgtagttttgatttgaatttctctaatgagtaatgatattaagtatctttttgtgagcttattcgccattcatgtatcttttactgagatgtctgtgtaaatcttttgcacccatttttaaatttcattgtctttattattgagttttaagtattctttatgtattctggataaaagtcccttatgagaaatattatttgcaaatattctttgagtttgtagcttgacttttaatcctcttaatggcatgttttgaagtgcaaatatttttattttaaagttaaatttatcaaatttctcttttttttttttttttgagacagagtctcactctgtcgcccaggctagagtgcagtggcatgatctcggctcactgcagcctctgccttccgggttcaagcaattctcatgcctcagcctcccgaatagctgggattacaggtgcatgccaccatgcctggctaatttttgtatttttagtagagatgaggtttcactacgttggccgggctggtcttgaactcctgacctcaagtgatccacctgcctctgcctcccaaagtcctgggattacaggggtgtgccactgcacccggccattttttttttcttttatgttgtgattttgacaccacatctaagaactcttacctaaccacaagtcacaaagattttctcctgtgttttctcctaacagtcttacggttttagtacttacagttaagtctatgatccatttggttagtttttgtgtatggtatgagattgtgagtctaaattcatctttttgcttatggataaccaattttcccagcactgtttgttgaaaagactgtcttttccccgctgaattgtattggcacctttgttgaaaatcagttggtcatgagtgtaattctgagtcattttgacatttacttttttttttcctttgagatggagtcttgccttgttgcccaggctagtctcgaccttctcggttcaagcaatccccctgcctcagcctaccaagtagcttggattataggcatatgccacagtgcccagagacatttacatatttttgagggagagcaaagctaagaggatatgtgtgtataagtgcatagcatggagactaaaagcatggttaccaaactgttgtcagtggcgtaactcttcgtaggagactggaagtatcagaaagatggggattatatttccatcctattaaatacacttgtatcttttaaaatgagattatgtcaagaaaatgagaagacaaggcacagattcggagaaatatttgcaaaagatgtatctgataaaagactgttatccaaaagatacaaagagctcttaaaacccagcaagaaggaaacgaacaacccaattaaaaatgggcaaaagacctgaacagttacctcaccatagaagatatacagatggcaaatacgcatatgaaaagatgctcaacatcatatgtcattagtgaactacaaatcaaaacaacagtgagatactaccacatacctactagggaacagtgaaaattcaaaacactgccaacagcaagtgctggggagggtatggagcaatacgaactttccattcattgcctatgggaatgcaaaatgttatatccactttagaagacagtttggcagtcactcgcaaaactaaacatactcctaccatacgatctagcaattgcgctccaaatgagttgaaaacttatgtccatataaaaacctgcacacggatgtttttagcaatatagcagctttattcataattgccaaaacatggaagcaaccaagatgtccttcagtggaggaatggataaataaaaaaaaaattagattgtgttcacattgtgtaatttaagaaacaacatttaggatatcttttctaccattttagcattttagtcaaaaataatctaggagagttattcatgtatgatattctttatgtagattttggaggtttgtaagacgaaagataatgaaaaactttaccataaaaattatttgaacactaaattgagaatgactcagtccagttttaataactcatcatttctgaatcactatttttaatttttttttagtcttcagctcattcgtttataactttaatatggctagcattaatctggtaaacttgtgctttattaacagatagaagatgtaatccacaaattcaacaatctgatcaaacttgaggaatctgggtggcaagtcaataataatatgaatcataatatgaacaaaaatgtctttagggtaagtttgtgggttttatatccaatttttttttttttagttaaggaactgttatacatacatccaaatttctaatatagattcttctacttcttgtttttaagttttaaaaacatttaggtttagatttctcattattttacaaagttaagtctttatactacttagagtgtacttgattgcctttgaagaaagagcaaggaaatcgatcaacataaaatttaggatagttatgtctagagagaagaaaggaggggctgtgattgaattggggtacccagagggcttctaagttaccacatactggatatatgagtgttggttttattcttcttcttctttttttttttttgagatggaatcccgctctatcaccaaggctgcagtacagtggcgtgatctcagctcactgccagctccgcctcccgggttcacgccattctcctgcctcagcctcccaagtagctgggaatacaggcgccagccaccacacccggctaattttttgtatttttagtagagacggggtttcactgtgttagccaggatggtctccatctgctgacctcatgatccacccacctcggcctcccaaagtgctgggattacaggcatgagccaccgtgcccggcctaaaggttttattctttaaactgtacttacacattttgttataatagtaatagtagtaggtaacttatataatgcttagtatgtgtcaaatattattccaattactttatatatattaatccttacaacagtcgtatgaaatggatgctgttattcttgtgctttgttaacatgacagattttgttcttgtttctagtaattatctttctagtaatgtttttgaattcaaagtttttggtttgggtggacacttttcaaactaagcattgtcagtttttctttatgatatgagaaaaatgcctgtagttataaactcaggttgtctagattggtattttattatactatgtaatccaaataaaaactgtcttaaatcctatcttaagagtttaacttgttaaagtattgttttttaaaccttatttttaaaaaattcttttttttttttttttttttttttttgagacagagtttggctctttttgcccaggctggagtgcagtggcgtgaccttggttcaccacaacctctgactcctgagttcaagtgattctcctgcctcagcctccaaagtgctgggattacaggcatgagccactgcgctcggccttaaaaaatattttactaggccaggcacagtggttcacgtctataatcccagcactttgggcggctgaggcgggcagatcacctgaggtcgggagttcgagaccagcctgaccatcgtggagaaaccccgtctctactaaaaatacaaaaattagctgggcgaggtggcgcatgcctgtaatcccagctactcaggaggctgaggcaggagaatcacttgatcctgggaggcagaggttgtggtgagctgagatcacgccattgcattccagcctgggcaacgagcaaaactcagtctcaaaaaaaaaaaaaaaaaaaattttttttttactaataaagtctcatgacaaggaccctgaggacagtgactaaattgattgaatggatttcaaaactactaaatagtgaaggatgctacttcattattaaagctactgtgggtatttcttattaaggatttagtcctggaaatattaatatcatcagtgatgcagatcatggctatgtcctatagagatttgtaattctgcctgttatcaccaggtgtctctctcctactttattttataggctacctttaagattatcaaacaaagctaatcttttatactatacttggataccactccctactacctcttatttattaatccctcattccatcagttagtcttgttttcctttcctcccttttttccatcagtctttaaacatgtttaagtgtcttatcattgtttacattaaaacaaacctgtggtgtctgcttctccctttaattacttgtacacccccattttttctttctatccagtcactgacaagcatcctaaaatgttttctatactctattatttttgttcctttatttctccaactcattgcaattcagttttacccccctataactttagaatagttatctaaattattaatccactagttgcttaagttattaggcacttaattttaaattctaactcttctaggccaggcgtggtggcttaagcctgtaatcccagcactttgggaggctgaggcaggcagatcacctgaggtcagttcaagaccagcctggccagcatggtgtaccctgtctctactaaaaataaaaaattagccaggcatggtggcgggcgcctgtaatcccagctactcaggaggctggggtaggagaatcacttgaacccgggaggcagaggttacattgaaccgagatcatgccactgcactccagcctgggcgacacatcaagactctctcaaaaataacaaaaagtagtaaataaatctaacctttctgcagtattaaatatggtctactttttttttttttttatatagagtcttgctgtgttgcccaggctggagtacagtggcgccatctcggctcactgcaacctctgcctcccaggttcaagctgttctcatgtctcagcctcccaagtagctgggattacaggcgtgtgccaccacgcccagctaactttttttcttgtatttttatttttgtattttatttattttttgagatagagtctaggtgtgtggcccaggctggagtgcagtggcacaatcttggctcactgtaacctcagcctcccaggttcaagcaatctcccacctcagcctcctgagtagctgggactacaggcatgtgccaccttgcccagctaattttttgtatttttagtggagctggtgtttctccatgttggccaggctggtctggaactcctggcctcaagtgatcctcctgcctcagcctcccaaagtgcggggattacagttgtgagccactgtacctggcctacttccttgtttttgaaattatatttccttcttctttgcctattcttcagtcatatttgcatatttgttttccatttatcccttaaatgtttttgttatttagaattcctacctctactctcttctttccttccgtaattttcctgtgcaatcttacccaacctgtgatgattctcaagtctgtattgcagaccacacttactaagctctaattctatatatcatgactcaatataccttaaaaatcaatatatcccaaactgacagcatctccacacacaccaatgttgccctgtctcataatgctgttaccatcccaccaggtgttcaagatagaagtctcaatatctcttttgagatatccttttgagcgataccctttgcttgctttatttcaccatctccaccccacacacatccaatagatgagtaagtcctctcaattctacctttcaaatatctcttgaatctgtccacttttttcatctcttactccttagtctgagtgatctttctaaaacaccagcttgatgttaatcttctgcttaaaaattaccaataactctctgttcccttgtcctctgtgtaaatgtgactttcttaagaccattacatgcaggtgatttttattataatctagctattgtttaaatccacttttctttgtttcatttctggctttggaaacatctctctagcacttgcctcaccccatcttttagtttgatgaaatatggtttcagcataggtgctacttcctacaacctttcctgatgcctgaagattggtttaggtgtcatccttatttattttcttttaatgttttactttttttttatttactttttttgctttttcttttttatggggggggggtgtcatggttataatctaaaggatgtcccctaaatttatttctaacaggacatttatccttcttactattcttcccagatcttctactaagctgcaaactccttgagggcagcaactctgtcctttacctttttaccttttagcacatactaggaacttgataaatatatgatgaatgtgaaatattttatgtatactttatttttaaaaattaaatttttaagtgatgaatttgtgtttgttgtgtgtttttcttgtaagatggtaatgggcagctttactatgttagtttctctttgcagaaaaaagttgtctcaggtatagcaagtaaaccaaaacaggatgatgctggaagaattgcagcgagaaatcgcctagctgccataaaaaatgcaatgagagagagaattaggcaggaagaatgtgctgaaacagcagtttctgtgataccaaaggaagttgataaaatagtgttcgatgctggatttttcagagttgaaagtcctgttaaattattctcaggttagttgtttttgattttttattttttttgtttttcctgagactacttaagagaaatatttgggatagatgggggcttgtgtaaggtgaaaaatagttttttacatgaagagacataagtttttctgtgatttttagaaaatagactatgctcgctcacaaacactgtaaatcacattttgatgggtatgatcagattagtttaagtgcgataagtcttctaagattgcttttctactttctaagtgatttcacatctgtaatgtaattaccatgtaaccctacagtctatgagaaaggtcacaggatcccaagaggtaagagaaatgacggaagcatgaagaagtaaactgattttcttcaggtcagttagaagtttggttagaatttataatgcaaaggaaacttgagcatccagctatcacacttgtctagctgtgctttaaaatgaagcttatgtgctgtgtgtgttggttcatgcctataatcccagtactttgagagaccaaggcaggaggatcacttgaagctaagagtttgagaccagcctgggcaatttagtgagatcccctctctacaaaaaaataaaatattaaccgagcctggcagtacatgcctgtagtcccacctacttgggaggctggggcaggaggatcacttgagcccaggagttcaaggttacagcgagctatgattgtgcccctgcactctagcctgagtgacagagcaagactccatctctaaaaaataaaaggaagtttatgcaaagtggatttggttttatttgcatttgtattaaaacttttgctcagatctttttgaaaggtagtaaacgtactaattttccaatttaaaaatattccagtaaaagcagtttttaatattcaggaaatcatttttttgtgattttctcacagtgtttgtcatagcttttttttccacagactatttttcttgaattgaatttatctcaattgaaattatttatttataagccatagatgtccaccaggaagttttttcaaagtaaacctaaattgttctctaatacctgctatctgatatttatagtgatcctcaagtatattataatattcttgttagtttaggtatcaaatctggtgtacttttgtttcctttaagcagctacactccctggatacccaggaatctcccactactgctaataacatgactccattctactacttgtcaaggatcttcgtggtttttacagctataagctcatcattctgttctttcatatactcaactcagtccttatagatagggagattaaggtttatggcaaaaattggtcatttaaaattgagttttagttacagagcacatagttgatatgaggctaattacaaaacagtagtccctgaagaagcccttctcattccatttgccaatccctagaagcaactactttcaattcttactggagtcttttggacttactggagtcttactggagttttgttgtttaccaccatctctcttgacaaggtttgatctttttcaaaaacacatttttcttctggtagactttttaatctttctttcctgtacttactgttttcttctacttcctggagatttcctcaactttcatgctggctatcatgtttttaattcccaagagccctttcttactctccaaatgttcattttataacattctgcacttgtttcatcagtgtattgttttatctttccaaggatattaatgatagcttttatgttttcttcatccactatagacagtatttgtttcagggtactttcatctagttgtttttggtttctgtctcttgtatttagaggctttcctcgggaatctggtgatctctcactgcctgcacatggttaagaatagggcactaaaaagctgactggaaactctctgcacatgggtaggacctttactttcggggcccttctgttagcggggccattatgctgggaacctacacatcactgcatttaagacttttctcatagtctactcagattccccagagaagatgctttccatctgcttcctggaaggtatcattctggctgccagtctttcaggagccatgtaggggaagaaagctaagtgtctcaacactttgtgtaaatattcacttatttcccttattttccatgtagtaccctgtctctcaactgtatctggtatcctctaaaccagagacccttctgtttttggtgatgggggtgggtgatgacagttgctttgctgtgcagaatgaggaaaggaatctgagctcttcttgtttaaactgactttgagccattccttctgtgtttagctccattttcatctccacttgcagagatacttggagccaccagttcttttgaggggttatgtggtagaaattgggttgattctcatttttctttcttttttttttttgaggcagagtctcactctattgcccaggctggagtgcagtggcacgatctcagcacactgcaagctccgcctcctgggttcacgccattctcctacctcagcctcccaagtagctgggactacaggcgcctgccaccacacccggctgattttttggtatttttttagtagagacggggttttaccatgttagccaggatggtctcgatcttctggccccgtgatccacctgcctcagcctcccaaagtgctgggatcacaggcatgagccaccgcgcccggccaattcatttttcttgattggtggcttagaattagttttcttgagtctgctaagtcccactcaacaatctacattatagcttccaaaatattgttattgttgctatctcttctttagtttcctttgtccttgtagagttctgctttttaagattatctgtgtccaggcacggtggctcacacctgtaatcccagtactttgggaggctgaggcaggtggatcacctgaggtcaggagttcgagaccagcctggccaacatggtgaaacctcatctctactaaaaatacaaaaaattagccaggcgtggtggcgggtgcctgtaatcccagctactcgggaggctgaggcaggagaatcacttgaacccaggaggcggaggttgcagtgagccaagatcatgccattacactccagcctgggcaacaagaatgaaactccatctctaaaaaaacaaaaacaaaaaaaaaggttatctctgttcaggcctggcgcagtggctcacacctctaatcccagcactttgggaatctgaggcaggtggatcacctgaggtcaggagttcgagaccagcctggccaacatggtgaaacctcatctctactaaaaatacaaaaattagccaggcgtggtggcatgcatctgtagtcccagctactggggaggctgaggcaagagaatcacttgaagctgggaggcggaggttgcagtgagccgagagatcacaccactgcactccagcctgggtgacagtgtaagactctgtctcaacaacaacaaaaaaattatctctgttcatgtaaaagtagtgggatgtcaaaaggaagcagcatctaatatgcatttaaatactatctttaacagaaagtcccaggcatttgtctttaacagacattatttgacaggagaaagaggctaattgataggattttcaccgtattcctagttataatgaaaagcaaaagaactatttggtattgaggtgatttctctcatcttctaggactttctgtctcttctgaaggcccttctcaaagacttggaacacctaagtctgtcaacaaagctgtatctcagagtagaaatgagatgggcattccacaacaaactacatcaccagaaaatgccggtcctcagaatacgaaaagtgaacatgtgaagaagactttgtttttgagtattcctgaaagcaggtatttctttaacatgttaataagagtttaacagttgctgatactaaataccatttcagattgttaagatggtaaaaggtgccagacatatatttttaataaatttcataatgaccctgcaacatataggcagtactccctttttataaatgaggaaactaaagcttaaggtttcaggatactaaatggtcacgtttagttgggtaaattctgcagcagtaagaagaaaagaagcaatatggtatcctttggtgctaaacatactacaactttggtgctcaacagttctgagctgagaagagctctgtgacttactagctatgcaactttggggcaagtaattaattctctttagcttcactttcatcatctacaaagcagcagtgctaatgcctccccaaggtggttgagagatggacactttttaccaggctttgtagaaagtaccttgagattgttttcttgacagatggcagagcatattgaaggggggggagttaatgtgtactgaacaactgttatgggctagatatgcttctagatttttttgtttgttttttggaggtggagtctcactctgttgcctaggctggagtgcagtggtacgatttcggcttactgcaacctctgcctcctgggttcaagcgattcttctgcctcagcctcccgagtagctaggactacagacacgcgccaccacgcccagctaatttttgtatttttagtagagacggggtttcactatgttggccaggatggtcttgatctcttgacctcatgatctgccagccttggcctcccaaagtgctgggattacaggcgtgagccaccatgcccggcctactttgtatatcttgtagtttactattgtttgctaagaagattcataattgcatttgagtcataagtactctttaaaaatgttttggattccccaaaacatcctcaaagggcatcatacaaataagcaactttgtgtaataaaggcaaagtaaagctggacactagaaaaatagagcatatcttttttaaaaagtaacttgaaagaagtggagataaattttttttttttttttgagacggagtgtcgctctgttgctgaggctggagtgcagtggcactacctcggctcactgcaacctccgcctcccaggttcaagtgattctcctgcctcagcctcccaagtagctgggactacaggcgcatgtcaccacgcccagctaattttttgtatttttagtagagacggggtttcaccatgttagccaggatggtctcaatctcctgacctcgtgatccacccgccgctgcctcccaagtgctgggattacaggcgtgagccaaggcgcctggccaaaacagatatttctaataagatacaagctagtaacttcaggattagaataccttgtattctaactcaattattgtctagctggagttagctacatttacttgttaacaagcagcagacttaagaacattgtaactcctgttccgctttttgaactttcggataaaattatagaaatagtatgattgaagtcaagtttcttagcaggtacctggattaacaagtaacgagtaaatgtagctaactccagctagacaataattgaattgttgcttctgtctccagaagtcaccttctttttgacttttctttaatatatagctctggatttggctgagattcagagtattgctggtagagccacctgaccctgactgaccaccatggtaacagacttgtgagctttctggggaagaatgcatttagtttgtaaggccatcctgcagtagctatagtccaaaactaatctatctggatcacgcctgatcttgcaccaggctccatgtttgatccattccctaaactaattgccatcattaaaggaaagactcaaaatacaagtgaaacaataacaatatgtttatgagtgtaatgctgctttttttcttctttaggagcagcatagaagatgctcagtgtcctggattaccagatttaattgaagaaaatcatgtaagtacaattccagtgtggttagatagcccagtatgtcatatgtttatatcattatagaaagtaactttgtaaagcatccccagaatttccgttggaaatctaaatcagtcatgtagaattgtagttcttgtttcaatgacatttgggttgtttaaaaccatagtgtcattttgtattcttcaactcatatcagaatgaatatggaaccagtgaactagagcagaaatcagcaaactttggcccctatttttacaaatcatattttattgtaatagccacacatttgtttatgtattctatctggctgcttttgcaatacagtggtagagttgagtacttatgacagagaccctgtgactcacaaacctaaaatatttactatttgatcttttacagaaaatgtttgccagtccctgagctagagtataggtacttgctgagaaacttgccttcaatcatactatttctataatattatctgaactaattgttgaagaagcaggatagtaggatttataatgttcttaagactgtgtccgggatgtcatccttctgtttttcttgtatttaatagcaacaagacttttaaaatttgttccaagtaattaaattgataattaaatataatgccatttttacttccaggttgtaaataagacagacttgaaggtggattgtttatccagtgagagaatgagtttgcctcttcttgctggtggagtagcagatgatattaatactaacaaaaaagaaggaatttcagatgttgtggaaggaatggaactgaattcttcaattacatcacaggatgttttgatgagtagccctgaaaaaaatacagcttcacaaaatagcatcttagaagaaggggaaactaaaatttctcagtcaggtgagatatttaaaatatatttaaacgagcctttattaaagaaatgaacttggattaaggtataaattatcctataaggtccattttacattagatctaactattgaggatccttcattgttagtgaagaccctgaattagaacaattccctcaagattttttttttttttgagatggagtctcactctgttgcccaggctggagtgtagtcgtgtgatctcagctcactgcaacctccacctcccaggttgaggcgattctcctacacatgtaccaccgcgcctagctaatttttttatttttagtagagacagagtttcaccacattggccagcctgggctttttttttagttgtccttttcaacacatatccccaagtctttcttcaaaatatcctatttttcttccctactgcctagttctacctatattgttgtgatggttctgcaataggaaatggctcctatatttttgttataatgtgtgccagttttacctgccattttcatcagttagtctgtagctggtctaactggggcctatggtaaaacaaaaggttttaacctcggccagacatttaatgtcctccagctgttcttcatcagcattttctgggtacctttaatgttacaagcatgagatttgtttacagaagtctgcttttataccaaagttaaggataagaatttaactactttcaaaaaacattatagcataggggtctatatttttgtcttagcatttgatatgtggaacttttcatatttttcatggctttgtccatttctaacagccctcgaatgtgagaatattctttaaaaagtttttttttgttgtttttcagaactatttgataataaaagtctcactactgaatgccaccttcttgattcagtaagttttccaacttgacaagtccctttatattctagatttgttttataaaatgaatattgcttttctatttgtgtacaaggcttaaaatgtatatcttgtcattgttttgcttactcactcttcatttttcacagaatgaagaaaaatttggtgtttatatactttaaaatatagtatgttttaatattaaccctgaagatatgtttttctatatggtttttctatcaaatttgctctgacaaactgggtacttgaatatctgaatatatttctaagtgattcaagaaaaatataaggcaaagtttctgcccttctggggaaataatatctatcccaccttcagtcatcattggttatttatgtcctgctattttagtggctacttccctgcttttacttctggtgacctcttgcctctaaatctagttcaaacagcccttttgtgaagccttctgtaaaagctcttatctctctcatgttaatttatatataggtacagatgcacataggcatacagtgtttacatttcatctcttattcagggtataatatgaacgcattccaaaaatataacttaaggaataaaattccttattaactgtaaattccacattaggtagagctgtctgattcatacctttgatactggcactatggcacgaattaaatagtgctctctttcctgctgtttatatatatagcattggtttcagccccatcccagactttttttttttttttttgagacagagtttcactcttgcacccaggctggggtacaatggtgtgatcttggcccactgtaacctctgcctcctgggttcaagcgattctcctgcctcagcctcctgagtagctgggattacaggtgcttgccaccacacctggctaatttttgtattttttagtagagatgcggggtttcaccatgttggccaggctggtctcgaacttctgacctcaggtgatgccccccccccgccccgattctcaaagtgctgggattacaggcgtgagccaccgtgcctggccgatatttttatttcaatgatctggagttagggatttgtcatttttttcttcatcaagtgattcttatggtttacacctgtggttacagccttaccttggaattttccaggactaattactagaatagatcagaaaacggtcttggttttattcttctttaatctcagaatatgagaaattcattcataaagcaagtataggatcaaacaaccacagttttagttaacttcatgaaacctggcaaatacttagcttccataagccacaaattccttaaagacccttgtatatcttgtctttcattatttttcaaagctgccttttttgtggtcaggctctgggctgccctgtgtctcaggagcagaatgaaatgtgttactgtgacccacgtaccattctttcttggttttagccttctttaatcataaactgagacctagaggatcagggctttcagcataaagccaacttatgtaaacctgatttaaccctgttcccagatcgaaccctgaatgattgattctgagaatgtatgttgttataagtaaatccagagattaccaaatcgtaatattttaatagtaatgtgattaagagtacatcacaattatcttatatgttctcattgttaagtcttaataccttatcatttagtctgatatttttttcacttctgtaaatattagtatttagatgtctattttagacccaaattattggttgccccagtagcataatttgaacttgaagcagggcttgagggagtaaaaagatcccagcaggatcacacagtattaaaaggtctattaagtgctattatatggtttaggatttatggaatctatgtaagtggcttaagatacagcctcagttttattcattctgcatacactgcttgagtccatttacatattattcacatttttgtacatatattctgaatatacctttccaataaaaaaaactgtaatatacatttgaaataagatctactggaaagtagcataatcattgttgtttataattttattgttatatagggaaaatgtttacgtgtttcttgtttgtttgtttttgaggtgggatcttgctatgttgctcgggctggtcttgaagtcctgggttcaagtgatcctaccacctcagcctcccgagtagctgggactacaggtgtgcaccaccgcacccggtttatttttgttattaattaatccactatagaatgttgaagaattaattggtgaaactcttgatggatactttactgacttctctggatttgttctccagccaggtctaaactgcagtaatccatttactcagctggagaggagacatcaagaacatgccagacacatttcttttggtggtaacctgattactttttcacctctacaaccaggagaattttgaatttaaaaataaatccaaacattttccttcatattatcaatgcttatatattccttagactattgaaattttggagaaaatgtatttgtgttcacttctatagcatataatgttttaatattctgtgttcatcaaagtgtattttagatatactctttctcaagggaagtggggatattttgtacattttcaacacagaataaaaaatgtactgtgccttgcctctcttgtttaaaaggaataagcttaaggctaagtatacttattagcactttaaacattctttagtttaattgaaatattaacctgtgacagaaatatttgcatctttttacactttattcttagtttgaactcctaaatttgttgacgttgaacagctttgggtattacatattccagagtattctgaatttctttagatgagcttttcggattccgaagtcagtttgacatgctgcggtttcaaacagttcaatcattagagatgcgcattaaatccttacctttttgtttttattttcccattggcatggccaagagccattaaggaaatgcttttttcttttgaaaaaaatcatatcaatcatatatcagtcacatgagcatttaaaagattggtgcaaagaaacccaagatttacagtttatacaaagcaatatgcaacacaacaatattttgctctcaaaaataaagcagatcataataagacaatgtcagtaaatgtctttaataagatgtatcactgaattgtttcgaaaacttacagctgttcatggccctgggccattagaaaaccctagtttatgtatatt

SEQ ID NO: 9 - DNA, 20560 bp, Homo sapiens
tcaagatggaagaaagcggagataatacgcagccctcaaaggaacttagtctaatcggggggagcagacgatcgttcactgtgggaaaatggggtacgatttcccccagtgaggaaatcaactaaagccgagctttgaaaaggggagcagaggagcctgaggggaagcgggggcgtgtcgcctggcgtgaccagcgcggcaggaaaagcgggcccagggacccgggcctgtcacgccgcttccgcgcgtccccaaactctccctcggctcgcccacccacgcggcggggacccctccggcccctccccggccccacggccacttcttcccccacaagccggcctgcggtccgccttaccagcccgggccggacggggccgcagctcctggcagaccgcacagccttcgagcccggaatgccgagacaaggccggcgccgattggcgacgttccgtcacgtgaccttaacgctccgccggcgccaatttcaaacagcggaacaaactgaaagctccggtgccagaccccacccccggccccggcccgggaccccctcccctcccgggatcccccggggttcccaccccgcccgcaccgccggggacccggccggtccggcgcgagcccccgtccggggccctggctcggcccccaggttggaggagcccggagcccgccttcggagctacggcctaacggcggcggcgactgcagtctggaggtgagcgggatgcagcaatggagtcccaggcctggcctgggcacaggcggggagcaaggcctccgggcgcggaggtcagggcgtctagcagcagggcacgggccacgagtggagatttgggtcacacgggaagaatctgagccagggtgcaagttttttctgcgtccacctcctggccgtggccttctcactgcttaaagcgccccttggccttccctggaagtctgacctccgcaccctgcccgcggcctcgggagggctggggtggcctaccttcttaggccgactgtggctgagatgaagactgagattgtactacattgagtcaaagaccaacctgcatacacactcccctgctcccaggctgtctcaccactaggcaacaccgcctccatcttacttacccttttgcagggcccttttcctggttcttgagaatgtagcaagatttccccgctcaggatggggatgggtcggaggagccactctggaagtttcccgggcaagaaagtgttggcaataataataacgggctggtcaggaagtagaagagaaaattaagacttagatatcctgtggaaaaagaggaataatatctactgattgatgcggggagagagggaagcctggaaagatcggaggtgaaagtaaaactgagatttgaaggtagaggtgtggagggcctgtgaactctatgcagatgacaaatgtcaaaaaagtgcagttgcttttcagggagagaataagtgtcctaaaaaagagacagccaattcctctgtcttccaaagttccgtgaaatagaattacacaattttgcttaatggtagaatattccatgtatctattaaaatcaacaaaaggccgggcgcagtggctcacgcctgtaatcccagcactttgggaggccgaggcgggtggatcacctgaggagttcaagaccagcctggcaaacatggtgaaaccctgtttctactaaaaaaaaaaaaaaaaaattagctgggcatggtggtgcatgcctgtaattgcagctactcgggaggctgaggcaggagaatcgcttgaacccgggaggccgaggttgcagtgagctgagattgcgccattgcactccagcctgggtgacaagagcgaagctccgtctcaaaaaaaaaaaaaaaattaaaaaaaatcaacaaaagacttaaaaaaaaaagactacactgttagcatttcagaaccaccttagtgtaatgatgatagctcattgtggtactaagaagacaggggttatagtcttatttctggaaaagaaattaataaagtggcatgcttagttaaaatatatataaccacatgcaagtactaaaatgccactgtataaatacaatacaaattgtaaaagaaaacatgctttttaaattagagcaagtataatagcctgtgaaataaatgtcaccctctagagttgttcagtgcacaagctgcacaactttacatgggccttcagtagaggtttccattttatgtgaggttttgtaaactgggagatgatttttccagtagtgtggcaatagtacaatctgcctttcttccctgattctgtgtgcactggtcctatttacaaagtaatataaaaatcaaaaggcttggccagacgcggtggctcacgcctgtaatcccagcactttgggaggccgaggcgggcagatgacctgaggtcaggagtttgagaccagcctgagcaacatggtgaaaccctgtctctactaaaaatacaaaaactagccgggcgtggtggtgggcacctgtaatcccagctactcaggaggctgagacgtgggactcgcttaaacccaggaggcagaggttgcagtgaactgagatcgtgccactgcactccagcctgggtgacaaagtgagactctgtctcaaaaaaaaaaaaaaaaaaaaaattaaaatcctttgtcttgaatggattatgggatcagagtttcatcaggactcctaattaccatatgctttcctattctagcatcttccatttctgtccatacagtcattgcaagtgatctatttatattatagtaggcaattatagagatttccacatatttgtagctatcccatccatttctgtagccaaatattctgaagcttcaaggagatctttgtcttatctccaacccagtcccatttttgccctttgaattgcttctgtctgctgtaattttagccttcttttgtcagtaaagcttatctccttattatctgaggtctttacaaaagtccatggaatgtttacctgggcctttaggctcatgttcctggtcatataaagaggagcacctttctctaaaaggacctcttctcagcctaaacaatctctaacatcttgccactatttgcattttccagggtccacacttgtgattctcaatggagagtgaaaacgcagattcataatgaaaactagcccccgtcggccactgattctcaaaagacggaggctgccccttcctgttcaaaatgccccaagtgaaacatcagaggaggaacctaagagatcccctgcccaacaggagtctaatcaagcagaggcctccaaggaagtggcagagtccaactcttgcaagtttccagctgggatcaagattattaaccaccccaccatgcccaacacgcaagtagtggccatccccaacaatgctaatattcacagcatcatcacagcactgactgccaagggaaaagagagtggcagtagtgggcccaacaaattcatcctcatcagctgtgggggagccccaactcagcctccaggactccggcctcaaacccaaaccagctatgatgccaaaaggacagaagtgaccctggagaccttgggaccaaaacctgcagctagggatgtgaatcttcctagaccacctggagccctttgcgagcagaaacgggagacctgtggtatgtggtcttccagggaaaggggtgagggagcccagcctttcctctgtagtggcaaggtgtgtagtcagtcttgatgcttacaacagtcaggcttctggccgagcacagtggctcatccctgtaatcccagcactttgggaggctgaggcgggcggatcacttgaggtcagcagtttggactagcctggccaacatggtgaaacccgtctctactaaaaatataaaaaaactagccgagcgtggtggcacacgtctgtagtcccagctactctggaggctgaggcaggagaatcgctgaacctgggaggtggaggttgcagtgagctgagattatgccactgcactccagcctggccacagagggagactctgtctcaaaaaaaaaaataaaaatgaaaaaagaaggggtctcaaaaataaataaatgaagaaggggtctcactatgttgcccaggctggtctcggactcctgagctcaagggatccaaccatatgggcctcccaaggtgctgggattataggcatgaacgacagcgcctgacttcattttccttcttttttttttttttttttttgagatggagtcttgctctgttgcccaagctgtagtgcagtggtgcaatctcagctcactgcaatctccaccttctgggttcaagtgattctcctgcctcagccttctgagtagctgggattacaggcacccgccaccacacctggctaattttggtattttttagtagagacaggggtttgccatgttagccaggttggtcttgaactcctgacctcaggtgattcgcccacctcggcctcccaaagtgctgggattacaggtgtgagccactgcgcctggcctcattttccttcttgataaaggagaaaactgaagcaagaggaggaaaatgactttttctttagagatgcggtctcgcactgtcacccaggctagagtgcagtggcgcaatcacggctcactctagcctcgaatgcctggactcaagccattctcccacatcagcctcccaagtagctgggactataggcatgcaccatcattcccagttaattttttttttctttttgcagagatggggtcccactatattgcccaggctgaaaagtgacttttttggtgtgcatatctcaataattcttttgtaagcctgccttgattgatctctaaggctcagtgtggctcagcttgaaatgcaatttgaactatgctcctaaatttgtcctgaaatgcataatggggcagagtaacttagagccacaatagattcagcatgtgttctccgtccctaaaggcagaggtcttggacaagtgatccctagccaccaattctttcttttttattttttatttttctgagacagagtctcactcaggctggagtgtagtggcgcaatgttggctcactgcagccttcgtctcccgggttcgagcaattctcctgtctcagcctcctgagtagctgggactacaggcgtgtgccaccacacccagctaattttgtatttttagtagagacgaggtttcaccatgttggccaggctggtcttgaactcctgacctcaggagatccacccgcctcgccctcccaaagtgctaggattacaggtgtgagccactgcacccggcctgctagccaccaattctgatggacacacctgggcatctgatgaggcagctaagtggggtgttggattattttccctctagcagatggtgaggcagcaggctgcactatcaacaatagcctatccaacatccagtggcttcgaaagatgagttctgatggactgggctcccgcagcatcaagcaagagatggaggaaaaggagaattgtcacctggagcagcgacaggttaaggtgaattgttccgtccctcactaaagaaatcagatccagtgtagggaattcctaggtagggaaatggatcaagtggcctgatggaccagaatttccaagttctggtattagctctccacttcatgctattctgcataacttttgagctatttttctgcctgggatcttttctctcccatctgtgaaatttccttgagggcagagtcccttggtcactctgtattccagccagcactgggtttagtattttgtccttagtaggtattcaggaaatgattaagaggtcttcattttgggaatccacctgaactttaaagatgcttcccaacagtatgaacagtatgaattgaatagaatacaacaagttaattttattagaagatataatattaatagcagataaagtcagttatatatatacacgtatatatattttttttttttaagacagcgtcttgctctgttgcccaggctggagcgcaatggtgcagtcatggctctctgcagcctcgacctccagggctcaactgatccttctacctcagtcttccaagtagctgggacttgccagcttggtgcatgccaccatgcccagctaatttttgtattttttgtagagatggggtttcgctatgttgcccaggctgatttcaactcctgggctctagtgatcctcctgcctcagcctcccaaagggctgggattacaggcgtgaaccaccagcctggcctagatacgaattttaaatacttctctagcaatcaaaattgatctaacccaattgtgtagtctgggtttttttcccacagttaccaatataacacatctagattctattgtatatatgtgtaaatcactcattcaacctttattttcttttttttctcaacttttattttaggttcagggggtacatgtgcaggtgtgttacatgggtatattgtgtgtcgctggggtttagtgtacaaatgattttgtcacccaggtagtgagtatagtacctgctaggtagtttttctgtctccccctcctcccactctccaccctcaagaaggccctggtgtctagtgttcccttcttcatatccatgtgtgctcaatgtttagctcctgctttttttttttttttttttttttttgagacgtagtctttctctgtctcctaggctggagtgcagtgctgcgatttcagctcactgctacctccacctcccaggtcaagtgattctcctgcctcagacttctgagtagctgggattacaggtgcccgctgccacgcccggctaatttttgtatttttagtagagatggggtttcactatgttggccaggctggtcttgaactcctgacctcgtgatccacctgccttggccttccaaagtgctgggattacaggcgtgagccactgcgcccggcctctttttttttctttttgagacggattctctctttgttgccaggctggagtgcagtggcacaatctctgctcactgaaacctctgcatcccaggttcaagtgattctcctgcctcagcctcccgagtagctgggactataggcgcccgccaccacgcccggctaatttttttatttttagtagagatggggtttcaccatggtggccaggatggtctcaatctcttgacctcgtcatccacccgcctcagcctcccaaagtgttgggattacaggcgtgagccaccgtacccagcctagttcctacttataagtgagaacatgcaatatttggttttctgttcctgcattaaatcgcttaggatcatagcctccagctcaacaatctttaaaagtgaaaatttggccaggcgcgataactcatgcttgtaatcacagcactttgggaggccaaggtgagtggatcacctgacgtcgggagttccagaccagcctgaccccgcctctactagcaatacaaaattagctgggtgcagtagtacatgcctataatcccagctactcgggaggctgaggcaggagaatcacttgaacccaggaggcagagcttgcggtgagccaagatcgtgccattacactccaacctgggcaacaaaagtgaaactctgtctcaaaaaaaaaaaaaaagtgaaaatttacatgcgtgtatatgtaagtaaatattaattgtgctatatacataaaatttgtgtactttagaaagtaatatctccaattttaaaaatgtgaatgagaccgggcatagcggctgacaattgtaatcccagcactttgggaggccaaggtgggcagattgcttgagcccgtaagttctaggccagcctgggcaacatagcaaaatcctggtctctactactaaaaatacgaaaaaaaaaaaaaaaatcgccaggcgcaatggctcatgcctgtaatcccatcactctgggaggccaaggtgggtggatcacctgaggtcaggagttcgagactagcctggccaatatggtaaaccccatctctactaaaaatacaaaaaaagtagctgggcgtggtggcaggcacctgtaatctcagctacttgggaggctgcagcaggagaatcgcttgaacccaggaggcagaggttgcagtgagccgagatcgtaccattgtactccagcctgggcaacaagagtgaaactccatctcaaaaaaaaaaaaaaaattagctgggcgtggtggtgtatgcctgtagtcccagctacttggaggctgagacaggaggatcacctgagcctgggaaggtcaaggctgcagtgagctgtgatccagccactgcacgctatcctgggtgacacagtgagaccctgtctcaaaaaaagaaaaagaaatgtgattgatcagctctttgcctaaaacttagctaactgtgtgctttgcagacattgtctgactcatagtcttgagaatgtttctctcatacaaacattgaaatgagatgcgtttattcacagcacatcaggaacagaaatgggactaagacctaggtttctagacccaaaagtctgaaaaacgggcgtggttttagtgtaacatcaatgctttgagaatcaaagtacatactcaaactttcctaagaaatttcaactggaagggactggattttctccaaattcaacaaaatgatggatgacaaaaccagtttcttattggctagggtctaggctagatcatctccaagattcttcccaactctaaaattttattctatgagatagtggtctcagatgagtttgtttctagaccgtcctatgggataaaggtttctctagatgttcttcaagggcttgggttgggggtgcttctcatgaactctttcatgtcattccctgtgtcataaccctcaggttgaggagccttcgagaccatcagcgtcctggcagaactctgtgtctgagcggccaccctactcttacatggccatgatacaattcgccatcaacagcactgagaggaagcgcatgactttgaaagacatctatacgtggattgaggaccactttccctactttaagcacattgccaagccaggctggaaggtaatgtgtcccacagcaaccaaaatcaaggtcagcccagcctgacagtctctccagtgctgtactgcaacttgtatctgggacagcagttaagtgcaaaggacactagaatgataaacaaatgtatcttttagattgtgactcaatcttattgaatccaggcaaaatcattaagaagagctccttaactacttcatgtgttactacctaaagtccatggagggtcttcaatgtagcactcaagcccacttttctgctacactcaacagccgtcctagatgccagcagctagagtggctaagtagttttatgaaaatgtcttgattaaaaaaaaaaatgctgtctgtgagcctcatgacccaagatgtcatctcctgtagcgtcacatagcatttctagtgggcaggggttttcctttcacttcattcatggaaagaccgagatgcctgtgagtcaacatagctcacgcagttggtcggtgtcagagccacaaatgaggtcttctgacgggtgctcaattccaagtcaagtgtgctttgttttcctcatggtagaactctttcttttttttttttttttttttgagacagagtctcgctctgtcacccaggctggagtgcaatggcagatctcaggtcactgcaacctcctccgcctccaaggttcaagcgattctcctgcctcagcctcccgagtagctgggactacaggcatgcgccaccacgcctggctaatttttttgtatttttagtagagacagtgtttcaccatgttggtcaggctggtctcgaactcctaacctcaaatgatccacccgtctcgacctcccaaagtgctgggattacaggcatgagccaccacacctggcccctcatggtagaactatgttttttttttttttgagatggagtctcgctctgtcacccaggctggagtgcagtggcgcgatctcggctcactgcaagctccgcctcctgggttcacgccattctcctgcctcagcttcccgagtagctgggactacaggcgcccgccactacgcctggctaattcatggtagaacttttaattttactcccttccatcagcttactttcctagttttttgtttgtttgttttttgagacagggtctcaccctgttgcctgggctggagtgcagcctcagccccctgggctcaagctcttccctcctcaacatcccaagtagctgggataacaggtgcaccaccacagtccgctaattttttttttgtagagacagttgcccaggctggttactatgttgcccaggctggtctgaactcctagtctcaagcactcctcctgccttagcctctcagtgcactgtgattacaggcgtgagccaccacacccagccttaatttcctagtttcttgtttgtttgtttgagacggggcctcactctgtcacccaggctggagtgcagtgacatgatcttggctaacttcaacctctgcctcccaggttcaagtgattcccctgcctcagcctcccgagtagctgggactaaaggcatgcgccaccatgcctggctaatttttatatttttgatagagacagggtttcaccatgtttgctaggctggtctcaaactcctggcctcaagtgatccactcaccttggcctcccacagtgctgggattataggcgtgagccaccacgccgggcctaattccctagtttcttaatttctctgagccacctttcttgctattgatcactacctcacagccttactctgcttttctagcccctgacagctatctaggtcttttctttatcacaatctaaggttggcatcagtctttattcccgtagaatagatgggtttatggctgaaggtgacggctctgcggtgtggagtgtcaggagagttgccaagagggctgcaaagacaccagacgaagcctgtgctgagcacagtgggaggggcctgaggctggtttccccatgtgtttgaagggtgatgtttctgaatctaaagtagctgataaccagttgtcttgctcttcttccagaactccatccgccacaacctttccctgcacgacatgtttgtccgggagacgtctgccaatggcaaggtctccttctggaccattcaccccagtgccaaccgctacttgacattggaccaggtgtttaaggtgaatgccctgctttcctctaaatagggcctaagttggaggttgtcatagccatctcaaaaggaaacaagttctgctagtgatgctttcatttgatcaggggagagttagaagccagccacccaattagtgacttgcacaaaacccagtgaattaagtacacttgacaaataccaaatgacacatttttgtgccagaccagagcaaggagaaggctgttctgacccaacagaaagggctccccagggcagtgttttcctaacttccctgtgaatgggaattgcctgggacattgttaaaacacagcttcccagacccctctcttggggctcttgatttagtgcttctgggatgggcccaggaatttgtatttttagcaagcatctcaggtgattcttacaagaaattctgggaatgcttgctctaaaaaaagcccttcctgctgggtgtggtggctcacgtctgtaatcccagcactttgggaggctgaggcaggtggatcacctaaggtcgggagttggagaccagcctgaccaacatggagaaactccgtctctactaaaaatacaaaaattagctgggtgtggtggcgcatgcctgtaatcccagctacttgggaggctgaggcaggagaatcccttgaacccaggaggcggtggttgtggagagctgaaatcgcaccattgcactccagcctgggcaataagagtgaaagtctgtctcaaaaaaaaaaaaaaaaaaaaaaaaaagcctgccttaggctggagaccagaagctgagctaccagaacgtcttttcagaaagaagttattttggtttttcagagtgcccataaggctgctggtagctgtaaccattctcctgggaggggcagttgtctggggtgtcttttgtcatcagtcaggaataagtgtttttcccaatccggtcaaattgaccacgttggtggtaacttcatctcatttctctcccacaatgcctggccgccaccagccactggacccagggtctccacaattgcccgagcacttggaatcagtaaggttctttccctctggctcggggcttggccttgttttcctttcactgctcagcatggctttagtggacagagacaagatgtgatgtggggaagggtccctatggccatgttttgtctaggtgccagccctagacacagaacaccctgagggtcaggcacacacccacttccctccccttccatgggcatcacaagggcacactgagcagagcagggcacagcaggggagcatgctgcagcagccacaagcgcatggcaccagcctcaggggcggcagttcgttcgctcacttttgtgcctagcttttctttgccacgcatatagctacctgctctggcatcccccaggggtgttgaggacacgtgggtgaagcggtagtgccactctgccatcatgtgtctgtaggccacccacctgcccactcatcacagttttggagactgctcgcctacgtccatcccctcaggttggcctcctctctctgggctgtcattaactcaagcacacaccaccagagcagctggtggggttttgccatcccctctttaccttattgtgttaacataggtttctttctctccccatctgccacaagcagcagcagaaacgaccgaatccagagctccgccggaacatgaccatcaaaaccgaactccccctgggcgcacgttagtatgggagagtgggccttgggcctggtccttgttctggggccatatctttagggaaccagactctgggattctgttcccacctcaaagggatctgagcccagagaaggagagcaaagctcctggggctgagaaggggtgtactccagtccccctgctcctgatctctcgtgtttcctcctagggcggaagatgaagccactgctaccacgggtcagctcatacctggtacctatccagttcccggtgaaccagtcactggtgttgcagccctcggtgaaggtgccattgcccctggcggcttccctcatgagctcagagcttgcccgccatagcaagcgagtccgcattgcccccaaggtgggtgtcctattttcctctgaagagagattctggccaattaagaatgttggaccttcagcttgcaaagcactctgataagtgttccttgagagcttataaatctagttgggtagaaaaggcataaaaacatagggaagtgtaatagcattagaagagctaaaaaggtatttggattacaatgtaagtggtgtcagaaggcccataaatacctgatgagcttgtaagaattcagacaaaagtgattgtgatagatgggctaggattattaaggaagatacacaagggaggcaggccttagaaagagatggatttggccgggcgctgtggcttacacctgtaatcccagcactttgggaggccaaggcaggtggatcatgaggtcaggagtttgagaccagcctggccaacgtggcgaaaccccgtctctactaaaaaatacaaaaattagctgggcttggtggcacatgcctgtaatcccagctacttgggaggctgaggctggagaatcacatgagcccaggaagggaagttgcagtgagccgagatcactgcactccagcctgggtgacagagcgagactctgtctcaaaaaaaaaaaaagaaaagaaagaagtggatttgaggctagacgctgtgggtctcacttgtaatcccgacactttgggaggccgaggcaggggtattgcttacagccaagagttcgagaccagcctgggcaacatagcaagaccccagtctctgctaaaaatgcaaaaaaaaaaattagccacggtggtagtacatgcctgtggtaccagctactcaggaggctgaggcagaaggatcacttgagtccaggaggttgaggctgcagtgagccctgtttgcaccactgcactccagcctgggcaacagtgaggccctgtctcaaaaaagaaaagaaaaaaagtagatttgggtaagcaaacaggtgtagagagagcatgctaatgggcagtgccatggaggcgggaaatgcagttcgtacctggcagtagtaaagtgactgggtcagactaactcagggtttctcaagtactattcacgttgacagctggagaattctttgttgggcgtgggagggactgtcctgtgcactgaagggtgtttagcagtatcccttgttttccccactagacgccagtagcacccaccacaggcgcggcaatccaaatgcctccagacattgccaaatgtcccctggcagggagggaatcacccctgcttgagtatcactggtctagcttgaggggaaggtgagaagggtaaattcagagccaacttggatcagccatcagatctgcacttaacactgttaaagggttctgtgagtacgggctgacatgtaaccaaagtgaaaagcttcccccatccccttcagagagatgaaaatagcatagagtctggagtttagagcgacttgggtttgctttttttttaatatataaaatcttttaggccatgcacagtggctcacacctataatcctagtattttgggaggccaaggcaggaggatcacttgaggccaggagttcaagaccagcctgggcagcaaagtaagaccctgtctgtaacaaaaaaaaaaaaatttttttttaattagccaggcattttcatgtatacctgttgtcccagccacttgggaggctgaggcagaaggattacttgagctccagagctggaggctgcaatgagctataatcgtgccactgcattctagcttaggcaacaaaatgagaccctgtctctaaaaaacattttctttaattataaataaaacatattacacacaaaattataccacacatacataatttagcgtaaattcattcatgtggccgtagcatgtgccctgtttgggttttcatgcagtgggttttctcccctttcctttttggctccctctccaccctaccatcacccacatcacccctactcccaagataactggttgataatttatgatgctttcttgcatattttatcaatgctcttagttatactatacatgtatagcgatagccattttatatgtacacatacaacacacagaacattgataatgtaatcatgttgtgcatacttctctacatgtctctttttttttttttttttcctgagacggagtctcactctgtcgcccaggctggagtgcaatggcatgatcttggctcactgcaacctccgcctcctgggttcaagcgattctcctgcctcggcctcctgagtagctgcgatcacaggcgcacgtcaccacgcccagctaatttttgtatttttagtagagatggggtttcaccatgttggtcaggctggtctcgagctcctgacctcatgatccgcctgccttggcctcccaaagtgttgagattacaggaatgacccaccacgcccagcctctacatgtctctaactcaacaatgcctcatggaatttcttccaagtcacttggcatagtcctaattcattattttttagtgtccatgtaatattccatgatgtggctacaccacagatttttcagccattccacttttatggacagattctgtttctcaaattttgcccaatgaacgacactgcaataaatatgtttgcaaggatctctcttactagtgctttcatttctctaggatagagtcccagatgtgagattgttgggtgagaaggtattttaaattctactaaatattgctagattgctttccaaaaaagctatgataagtcatgtttaaaccagcaatatatgataagatctatatctttgccagcaattggtattattagtctgtttaatatctgccaatctaatatgtataggttatatcttcttaattttttaaaatgttttatttatttatttttaaattttttatttccataggtttttggggaacaggtggtgtttggttacatgagtaagttctttagtggcgatctgcgagattttggtacacccatcaccagcttgtttaattttatctttctttgtttatcagtaagtctgagcaccttgtcattatgtttggtgacttggaattgtcctctatgaattggttatttatgaacattgcccatttttatataggttttgttatcaatttgtgagagctctttttttttttttttgagacggagtcttgctctgtcacccaggctggagtgcagtggcgtgatctcagctcactgcagactctgcctcctgggttcaagcgattctcctgcctcagcctcccaagtagctgggattacaggcgcccaccactgcgcccagctaatttttgtattttttagtagagacagggtttcaccatcttggccaggctggtcacgaactcctgacctcatgatccacccacctcggcctcccaaagtgctgggattacaggcataagccaccacgcccagcctgtgagagttttttttttttttgagatggagtcttgctatgtcacccaggctgaagtacagtggtgtgatcttggcaacctctgcctcccgggttcaagcaattctcgtgcctcagcctcccgagtagctgggattacaggtgcatgccaccacgcccggctaattttgtatttttagtagagacaaggtttcaccatgttggtcaggctggtctcgaacttctgacctcaggtgatctgcctgccttggcctcccaaagtgctggattacaggcgtgagccaccgcacccagccccctgtgagagctctttgttgttaaaataatcttctttcttttatgctgaagatatttttctacttctattgtttatctctttactttcctttcttttcttttctgagacaggatcttgctatgttgcctagtctggagtgcagtggtgtaatgaaggctcactacatccttgacctcccaggctcaagtgatcttcccacctcagcctcccacctgtagctggaactacaggtgcatgccaccacatccagctaattaaaaaaaatttttttgtagagatgggatctcactatgttgctcaggctggtctcaaactggcctcagtgtcttgcagtgctgggattacaggcattgtttgttgtttcttaactttgtttatggtatctcttgccacagtaaaattttaaagttttatgtagtcaaatgtctctcttctcttttacagtttctgggtttccagtcttggttaagaaggtcacccgcaccctcagattgtatatgtagtctcctagattctctttcaggatttgtatgattttaaggttttcattttttttttaaagccagtcaaatttagcagttgggggttgtgtaccaactttagtgacaataatgtcactacccgctaccatcagagcagcctaaggttcttattttcatgcattaaatctttgtatacagtgtaagacaagcatgcaattttatttcctctcggatgaatgctattataattatgccactacatactacatacccgcatcttttacccccagaattgaactaccaacttcaacatacatcgtattctcatatttaatagattttaagacttcaaaacgacacaaagaggatcagaacccgtatgtgatatttttgtgcgtcctgtctggtgaccgttggttcaccttatctctgtttccctttcaggtgctgctagctgaggaggggatagctcctctttcttctgcaggaccagggaaagaggagaaactcctgtttggagaagggttttctcctttgcttccagttcagactatcaaggaggaagaaatccagcctggggaggaaatgccacacttagcgagacccatcaaagtggagagccctcccttggaagagtggccctccccggccccatctttcaaagaggaatcatctcactcctgggaggattcgtcccaatctcccaccccaagacccaagaagtcctacagtgggcttaggtccccaacccggtgtgtctcggaaatgcttgtgattcaacacagggagaggagggagaggagccggtctcggagaaaacagcatctactgcctccctgtgtggatgagccggagctgctcttctcagaggggcccagtacttcccgctgggccgcagagctcccgttcccagcagactcctctgaccctgcctcccagctcagctactcccaggaagtgggaggaccttttaagacacccattaaggaaacgctgcccatctcctccaccccgagcaaatctgtcctccccagaacccctgaatcctggaggctcacgcccccagccaaagtagggggactggatttcagcccagtacaaacctcccagggtgcctctgaccccttgcctgaccccctggggctgatggatctcagcaccactcccttgcaaagtgctcccccccttgaatcaccgcaaaggctcctcagttcagaacccttagacctcatctccgtcccctttggcaactcttctccctcagatatagacgtccccaagccaggctccccggagccacaggtttctggccttgcagccaatcgttctctgacagaaggcctggtcctggacacaatgaatgacagcctcagcaagatcctgctggacatcagctttcctggcctggacgaggacccactgggccctgacaacatcaactggtcccagtttattcctgagctacagtagagccctgcccttgcccctgtgctcaagctgtccaccatcccgggcactccaaggctcagtgcaccccaagcctctgagtgaggacagcaggcagggactgttctgctcctcatagctccctgctgcctgattatgcaaaagtagcagtcacaccctagccactgctgggaccttgtgttccccaagagtatctgattcctctgctgtccctgccaggagctgaagggtgggaacaacaaaggcaatggtgaaaagagattaggaaccccccagcctgtttccattctctgcccagcagtctcttaccttccctgatctttgcagggtggtccgtgtaaatagtataaattctccaaattatcctctaattataaatgtaagcttatttccttagatcattatccagagactgccagaaggtgggtaggatgacctggggtttcaattgacttctgttccttgcttttagttttgatagaagggaagacctgcagtgcacggtttcttccaggctgaggtacctggatcttgggttcttcactgcagggacccagacaagtggatctgcttgccagagtcctttttgcccctccctgccacctccccgtgtttccaagtcagctttcctgcaagaagaaatcctggttaaaaaagtcttttgtattgggtcaggagttgaatttggggtgggaggatggatgcaactgaagcagagtgtgggtgcccagatgtgcgctattagatgtttctctgataatgtccccaatcataccagggagactggcattgacgagaactcaggtggaggcttgagaaggccgaaagggcccctgacctgcctggcttccttagcttgcccctcagctttgcaaagagccaccctaggccccagctgaccgcatgggtgtgagccagcttgagaacactaactactcaataaaagcgaaggtggacatgctgggctctgtggtttattggcgtctgattcctaaggcaccaggagaggctggaaaagaaagagggtgttgatggagacgatggtgatagggaagaggcaaggcctgaagttcacccaaagcagcagttggagcacttgcacaggcacacacttgacaacacaaattgccagttttcccagtgctagtcctgcacagctcacctcttttccctggcgtctctgaccttgttccttgggacctttggacctgctggttaacttaggccttttgagggttcttaataagacaagctcacgaggggtagggccccctgaacattagggcaggaagggcccagttacaggtgcttcattcccactgccatccccaccctgaggcctgggagccagcctgccctgcttttcttctgcccggcagcagctcctgttacagttttttgcagtcagaacttgaagaaagtgctatcccctgcctgtctaacctgaaaagtagccaggggcccaagggtcacaagaggctccagggacaggtgagggcctcttctctgcatcaccactcaagcagcatcaccatagcaaccccaggagtaaacaatggt

SEQ ID NO: 10 - DNA, 12639 bp, Homo sapiens
cctggaaacccaggtcgtgcagtcaacgatgtactcgccgggacagcgatgtctgctgcactccatccctcccctgttcatttgtccttcatgcccgtctggagtagatgctttttgcagaggtggcaccctgtaaagctctcctgtctgactttttttttttttttagactgagttttgctcttgttgcctaggctggagtgcaatggcacaatctcagctcactgcaccctctgcctcccgggttcaagcgattctcctgcctcagcctcccgagtagttgggattacaggcatgcaccaccacgcccagctaatttttgtatttttagtagagacaaggtttcaccgtgatggccaggctggtcttgaactccaggactcaagtgatgctcctgcctaggcctctcaaagtgttgggattacaggcgtgagccactgcacccggcctgcacgcgttctttgaaagcagtcgagggggcgctaggtgtgggcagggacgagctggcgcggcgtcgctgggtgcaccgcgaccacgggcagagccacgcggcgggaggactacaactcccggcacaccccgcgccgccccgcctctactcccagaaggccgcggggggtggaccgcctaagagggcgtgcgctcccgacatgccccgcggcgcgccattaaccgccagatttgaatcgcgggacccgttggcagaggtggcggcggcggcatgggtgccccgacgttgccccctgcctggcagccctttctcaaggaccaccgcatctctacattcaagaactggcccttcttggagggctgcgcctgcaccccggagcgggtgagactgcccggcctcctggggtcccccacgcccgccttgccctgtccctagcgaggccactgtgactgggcctcgggggtacaagccgccctcccctccccgtcctgtccccagcgaggccactgtggctgggccccttgggtccaggccggcctcccctccctgctttgtccccatcgaggcctttgtggctgggcctcggggttccgggctgccacgtccactcacgagctgtgctgtcccttgcagatggccgaggctggcttcatccactgccccactgagaacgagccagacttggcccagtgtttcttctgcttcaaggagctggaaggctgggagccagatgacgaccccatgtaagtcttctctggccagcctcgatgggctttgttttgaactgagttgtcaaaagatttgagttgcaaagacacttagtatgggagggttgctttccaccctcattgcttcttaaacagctgttgtgaacggatacctctctatatgctggtgccttggtgatgcttacaacctaattaaatctcatttgaccaaaatgccttggggtggacgtaagatgcctgatgcctttcatgttcaacagaatacatcagcagaccctgttgttgtgaactcccaggaacgtccaagtgctttttttgagattttttaaaaaacagtttaattgaaatataacctacacagcacaaaaattaccctttgaaagtgtgcacttcacactttcggaggctgaggcgggcggatcacctgaggtcaggagttcaagacctgcctggccaacttggcgaaaccccgtctctactaaaaatacaaaaattagccgggcatggtagcgcacgcccgtaatcccagctactcgggaggctaaggcaggagaatcgcttgaacctgggaggcggaggttgcagtgagccgagattgtgccaatgcactccagcctcggcgacagagcgagactccgtcataaaaataaaaaattgaaaaaaaaaaaagaaagaaagcatatacttcagtgttgttctggatttttttcttcaagatgcctagttaatgacaatgaaattctgtactcggatggtatctgtctttccacactgtaatgccatattcttttctcacctttttttctgtcggattcagttgcttccacagctttaatttttttcccctggagaatcaccccagttgtttttctttttggccagaagagagtagctgttttttttcttagtatgtttgctatggtggttatactgcatccccgtaatcactgggaaaagatcagtggtattcttcttgaaaatgaataagtgttatgatattttcagattagagttacaactggctgtctttttggactttgtgtggccatgttttcattgtaatgcagttctggtaacggtgatagtcagttatacagggagactcccctagcagaaaatgagagtgtgagctagggggtcccttggggaacccggggcaataatgcccttctctgcccttaatccttacagtgggccgggcacggtggcttacgcctgtaataccagcactttgggaggccgaggcgggcggatcacgaggtcaggagatcgagaccatcttggctaatacggtgaaaccccgtctccactaaaaatacaaaaaattagccgggcgtggtggtgggcgcctgtagtcccagctactcgggaggctgaggcaggagaatggcgtgaacccaggaggcggagcttgcagtgagccgagattgcaccactgcactccagcctgggcgacagaatgagactccgtctcaaaaaaaaaaaaaaaagaaaaaaatctttacagtggattacataacaattccagtgaaatgaaattacttcaaacagttccttgagaatgttggagggatttgacatgtaattcctttggacatataccatgtaacacttttccaactaattgctaaggaagtccagataaaatagatacattagccacacagatgtggggggagatgtccacagggagagagaaggtgctaagaggtgccatatgggaatgtggcttgggcaaagcactgatgccatcaacttcagacttgacgtcttactcctgaggcagagcagggtgtgcctgtggagggcgtggggaggtggcccgtggggagtggactgccgctttaatcccttcagctgcctttccgctgttgttttgatttttctagagaggaacataaaaagcattcgtccggttgcgctttcctttctgtcaagaagcagtttgaagaattaacccttggtgaatttttgaaactggacagagaaagagccaagaacaaaattgtatgtattgggaataagaactgctcaaaccctgttcaatgtctttagcactaaactacctagtccctcaaagggactctgtgttttcctcaggaagcattttttttttttttctgagatagagtttcactcttgttgcccaggctggagtgcaatggtgcaatcttggctcactgcaacctctgcctctcgggttcaagtgattctcctgcctcagcctcccaagtaactgggattacagggaagtgccaccacacccagctaatttttgtatttttagtagagatggggtttcaccacattgcccaggctggtcttgaactcctgacctcgtgattcgcccaccttggcctcccaaagtgctgggattacaggcgtgaaccaccacgcctggcttttttttttttgttctgagacacagtttcactctgttacccaggctggagtggggtggcctgatctcggatcactgcaacctccgcctcctgggctcaagtgatttgcctgcttcagcctcccaagtagccgagattacaggcatgtgccaccacacccaggtaatttttgtatttttggtagagacgaggtttcaccatgttggccaggctggtcttgaactcctgacctcaggtgatccacccgcctcagcctcccaaagtgctgagattataggtgtgagccaccacacctggcctcaggaagtatttttatttttaaatttatttatttatttgagatggagtcttgctctgtcgcccaggctagagtgcagcgacgggatctcggctcactgcaagctccgccccccaggttcaagccattctcctgcctcagcctcccgagtagctgggactacaggcgcccgccaccacacccggctaatttttttgtatttttagtagagacgggttttcaccgtgttagccaggagggtctcgatctcctgacctcgtgatctgcctgcctcggcctcccaaagtgctgggattacaggtgtgagccaccacacccggctatttttatttttttgagacagggactcactctgtcacctgggctgcagtgcagtggtacaccatagctcactgcagcctcgaactcctgagctcaagtgatcctcccacctcatcctcccaagtaattgggactacaggcgcaccccaccatgcccaccttatttatttatttatttatttatttatttattttcatagagatgagggttccctgtgttgtccaggctggtcttgaactcctgagctcaagggatccttttgcctgggcctcccaaagtgctgagattacaggcatgagccaccgtgcccagctaggaatcatttttaaagcccctaggatgtctgtgtgattttaaagctcctggagtgtggccggtataagtatataccggtataagtaaatcccacattttgtgtcagtatttactagaaacttagtcatttatctgaagttgaaatgtaactgggctttatttatttatttatttatttatttatttttaatttttttttttgagacgagtctcactttgtcacccaggctggagtgcagtggcacgatctcggctcactgcaacctctgcctcccggggtcaagcgattctcctgccttagcctcccgagtagctgggactacaggcacgcaccaccatgcctggctaatttttgtatttttagtagacggggtttcaccatgctggccaagctggtctcaaactcctgaccttgtgatctgcccgctttagcctcccagagtgctgggattacaggcatgagccaccatgcgtggtctttttaaaattttttgattttttttttttttgagacagagccttgctctgtcgcccaggctggagtgcagtggcacgatctcagctcactacaagctccgcctcccgggttcacgccattcttctgcctcagcctcctgagtagctgggactacaggtgcccaccaccacgcctggctaattttttttggtatttttattagagacaaggtttcatcatgttggccaggctggtctcaaactcctgacctcaagtgatctgcctgcctcggcctcccaaagcgctgagattacaggtgtgatctactgcaccaggcctgggcgtcatatattcttatttgctaagtctggcagccccacacagaataagtactgggggattccatatccttgtagcaaagccctgggtggagagtcaggagatgttgtagttctgtctctgccacttgcagactttgagtttaagccagtcgtgctcatgctttccttgctaaatagaggttagaccccctatcccatggtttctcaggttgcttttcagcttgaaaattgtattcctttgtagagatcagcgtaaaataattctgtccttatatgtggctttattttaatttgagacagagtgtcactcagtcgcccaggctggagtgtggtggtgcgatcttggctcactgcgacctccacctcccaggttcaagcgattctcgtgcctcaggctcccaagtagctgagattataggtgtgtgccaccaggcccagctaacttttgtatttttagtagagacagggttttgccatgttggctaagctggtctcgaactcctggcctcaagtgatctgcccgccttggcatcccaaagtgctgggattacaggtgtgaaccaccacacctggcctcaatatagtggcttttaagtgctaaggactgagattgtgttttgtcaggaagaggccagttgtgggtgaagcatgctgtgagagagcttgtcacctggttgaggttgtgggagctgcagcgtgggaactggaaagtgggctggggatcatctttttccaggtcaggggtcagccagcttttctgcagcgtgccatagaccatctcttagccctcgtgggtcagagtctctgttgcatattgtcttttgttgtttttcacaaccttttagaaacataaaaagcattcttagcccgtgggctggacaaaaaaaggccatgacgggctgtatggatttggcccagcaggcccttgcttgccaagccctgttttagacaaggagcagcttgtgtgcctggaaccatcatgggcacaggggaggagcagagtggatgtggaggtgtgagctggaaaccaggtcccagagcgctgagaaagacagagggtttttgcccttgcaaatagagcaactgaaatctgacaccatccagttccagaaagccctgaagtgctggtggacgctgcggggtgctccgctctagggttacagggatgaagatgcagtctggtagggggagtccactcacctgttggaagatgtgattaagaaaagtagactttcagggccgggcatggtggctcacgcctgtaatcccagcactttgggaggccgaggcgggtggatcacgaggtcaggagatcgagaccatcctggctaacatggtgaaaccccgtctttactaaaaatacaaaaaattagctgggcgtggtggcgggcgcctgtagtcccagctactcgggaggctgaggcaggagaatggcgtgaacctgggaggtggagcttgcagtgagccgagatcgcgccactgcactccagcctgggcgacagagcgagactccgtctcaaaaaaaaaaaaaaaaagtaggctttcatgatgtgtgagctgaaggcgcagtaggcagaagtagaggcctcagtccctgcaggagacctctcggtctctatctcctgatagtcagacccagccacactggaaagaggggagacattacagcctgcaagaaaagtagggagatttaaaaactgcttggcttttattttgaactgttttttttgtttgtttgttttccccaattcagaatacagaatacttttatggatttgtttttattactttaattttgaaacaatataatcttttttttgttgtttttttgagacggggtcttactctgtcacccaggctgagtgcagtggtgtgatcttggctcacctcagcctcgaccccctgggctcaaatgattctcccacctcagcttcccaagtagctgggaccacaggtgcgtgtgttgcgctatacaaatcctgaagacaaggatgctgttgctggtgatgctggggattcccaagatcccagatttgatggcaggatgcccctgtctgctgccttgccagggtgccaggagggcgctgctgtggaagctgaggcccggccatccagggcgatgcattgggcgctgattcttgttcctgctgctgcctcggtgcttagcttttgaaacaatgaaataaattagaaccagtgtgaaaatcgatcaggaaataaatttaatgtggaaataaactgaacaacttagttcttcataagagtttacttggtaaatacttgtgatgaggacaaaacgaagcactagaaggagaggcgagttgtagacctgggtggcaggagtgttttgtttgttttctttggcagggtcttgctctgttgctcaggctggagtacagtggcgcaatcacagctcactatagcctcgacctcctggactcaagcaatcctcctgcctcagcctcccagtagctgggactacaggcgcatgccaccatgcctggctaattttaaatttttttttttctcttttttgagatggaatctcactctgtcgcccaggctggagtgcagtggcgtgatctcggctgacggcaagctccgcctcccaggttcactccattcgcctgcctcagcctcccaagtagctgggactacaggcgctgggattacaaacccaaacccaaagtgctgggattacaggcgtgagccaccgcacccggcctgttttgtctttcaatagcaagagttgtgtttgcttcgcccctacctttagtggaaaaatgtataaaatggagatattgacctccacattggggtggttaaattatagcatgtatgcaaaggagcttcgctaatttaaggcttttttgaaagagaagaaactgaataatccatgtgtgtatatatattttaaaagccatggtcatctttccatatcagtaaagctgaggctccctgggactgcagagttgtccatcacagtccattataagtgcgctgctgggccaggtgcagtggcttgtgcctgaatcccagcactttgggaggccaaggcaggaggattcattgagcccaggagttttgaggcgagcctgggcaatgtggccagacctcatctcttcaaaaaatacacaaaaaattagccaggcatggtggcacgtgcctgtagtctcagctactcaggaggctgaggtgggaggatcactttgagccttgcaggtcaaagctgcagtaagccatgatcttgccactgcattccagcctggatgacagagcgagaccctgtctctaaaaaaaaaaaaaccaaacggtgcactgttttcttttttcttatcaatttattatttttaaattaaattttcttttaataatttataaattataaatttatattaaaaaatgacaaatttttattacttatacatgaggtaaaacttaggatatataaagtacatattgaaaagtaattttttggctggcacagtggctcacacctgtaatcccagcactttgggaggccgtggcgggcagatcacatgagatcatgagttcgagaccaacctgaccaacatggagagaccccatctctactaaaaatacaaaattagccggggtggtggcgcatgcctgtaatcccagctactcgggaggctgaggcaggagaatctcttgaacccgggaggcagaggttgcggtgagccaagatcgtgcctttgcacaccagccaaggcaacaagagcgaaagtccgtctcaaaaaaaaagtaattttttttaagttaacctctgtcagcaaacaaatttaacccaataaaggtctttgttttttaatgtagtagaggagttagggtttataaaaaatatggtagggaagggggtccctggatttgctaatgtgattgtcatttgccccttaggagagagctctgttagcagaatgaaaaaattggaagccagattcagggagggactggaagcaaaagaatttctgttcgaggaagagcctgatgtttgccagggtctgtttaactggacatgaagaggaaggctctggactttcctccaggagtttcaggagaaaggtagggcagtggttaagagcagagctctgcctagactagctggggtgcctagactagctggggtgcccagactagctggggtgcctagactagctgggtactttgagtggctccttcagcctggacctcggtttcctcacctgtatagtagagatatgggagcacccagcgcaggatcactgtgaacataaatcagttaatggaggaagcaggtagagtggtgctgggtgcataccaagcactccgtcagtgtttcctgttattcgatgattaggaggcagcttaaactagagggagttgagctgaatcaggatgtttgtcccaggtagctgggaatctgcctagcccagtgcccagtttatttaggtgctctctcagtgttccctgattgttttttcctttgtcatcttatctacaggatgtgactgggaagctctggtttcagtgtcatgtgtctattctttatttccaggcaaaggaaaccaacaataagaagaaagaatttgaggaaactgcggagaaagtgcgccgtgccatcgagcagctggctgccatggattgaggcctctggccggagctgcctggtcccagagtggctgcaccacttccagggtttattccctggtgccaccagccttcctgtgggccccttagcaatgtcttaggaaaggagatcaacattttcaaattagatgtttcaactgtgctcttgttttgtcttgaaagtggcaccagaggtgcttctgcctgtgcagcgggtgctgctggtaacagtggctgcttctctctctctctctcttttttgggggctcatttttgctgttttgattcccgggcttaccaggtgagaagtgagggaggaagaaggcagtgtcccttttgctagagctgacagctttgttcgcgtgggcagagccttccacagtgaatgtgtctggacctcatgttgttgaggctgtcacagtcctgagtgtggacttggcaggtgcctgttgaatctgagctgcaggttccttatctgtcacacctgtgcctcctcagaggacagtttttttgttgttgtgtttttttgtttttttttttttggtagatgcatgacttgtgtgtgatgagagaatggagacagagtccctggctcctctactgtttaacaacatggctttcttattttgtttgaattgttaattcacagaatagcacaaactacaattaaaactaagcacaaagccattctaagtcattggggaaacggggtgaacttcaggtggatgaggagacagaatagagtgataggaagcgtctggcagatactccttttgccactgctgtgtgattagacaggcccagtgagccgcggggcacatgctggccgctcctccctcagaaaaaggcagtggcctaaatcctttttaaatgacttggctcgatgctgtgggggactggctgggctgctgcaggccgtgtgtctgtcagcccaaccttcacatctgtcacgttctccacacgggggagagacgcagtccgcccaggtccccgctttctttggaggcagcagctcccgcagggctgaagtctggcgtaagatgatggatttgattcgccctcctccctgtcatagagctgcagggtggattgttacagcttcgctggaaacctctggaggtcatctcggctgttcctgagaaataaaaagcctgtcatttcaaacactgctgtggaccctactgggtttttaaaatattgtcagtttttcatcgtcgtccctagcctgccaacagccatctgcccagacagccgcagtgaggatgagcgtcctggcagagacgcagttgtctctgggcgcttgccagagccacgaaccccagacctgtttgtatcatccgggctccttccgggcagaaacaactgaaaatgcacttcagacccacttatttctgccacatctgagtcggcctgagatagacttttccctctaaactgggagaatatcacagtggtttttgttagcagaaaatgcactccagcctctgtactcatctaagctgcttatttttgatatttgtgtcagtctgtaaatggatacttcactttaataactgttgcttagtaattggctttgtagagaagctggaaaaaaatggttttgtcttcaactcctttgcatgccaggcggtgatgtggatctcggcttctgtgagcctgtgctgtgggcagggctgagctggagccgcccctctcagcccgcctgccacggcctttccttaaaggccatccttaaaaccagaccctcatggctaccagcacctgaaagcttcctcgacatctgttaataaagccgtaggcccttgtctaagtgcaaccgcctagactttctttcagatacatgtccacatgtccatttttcaggttctctaagttggagtggagtctgggaagggttgtgaatgaggcttctgggctatgggtgaggttccaatggcaggttagagcccctcgggccaactgccatcctggaaagtagagacagcagtgcccgctgcccagaagagaccagcaagccaaactggagcccccattgcaggctgtcgccatgtggaaagagtaactcacaattgccaataaagtctcatgtggttttatctactttttttttctttttctttttttttgagacaaggccttgccctcccaggctggagtgcagtggaatgaccacagctcaccgcaacctcaaattcttgcgttcaagtgaacctcccactttagcctcccaagtagctgggactacaggcgcacgccatcacacccggctaattgaaaaatttttttttttgtttagatggaatctcactttgttgcccaggctggtctcaaactcctgggctcaagtgatcatcctgcttcagcgtccgacttgttggtattataggcgtgagccactgggcctgacctagctaccattttttaatgcagaaatgaagacttgtagaaatgaaataacttgtccaggatagtcgaataagtaacttttagagctgggatttgaacccaggcaatctggctccagagctgggccctcactgctgaaggacactgtcagcttgggagggtggctatggtcggctgtctgattctagggagtgagggctgtctttaaagcaccccattccattttcagacagctttgtcagaaaggctgtcatatggagctgacacctgcctccccaaggctttcatagatc

SEQ ID NO: 11 - DNA, 12746 bp, Homo sapiens
agacacatttggctatgacctgccagtttgctaggcattcttccaaccttccctccctctgaccaagaaactgagtgtccactattttaggccctgggaaattcagtagcgaggaggccagacagcttcgttgcatcatggggggctctggtactgtgcttctccaacttcaggatgtgtaggaatcacctgagcagtcttgttgagaggcggacactgactcgggaggtctggggtagggcctgaacgtttgcctttgcggttctaacaagctctcaggtgatggcgatgctactgttccctggccccgaggtagaggaagatttaagtaaaagcttcctggaggaggcgcaagtgaaccgcaggagctttcccggacgcccgagaaagggagaaaccccgaaggaattcctcctctctcggggctgggtctccgcatccacgccgggtttggtttcccaggctatcccacgtgttcgggcgtccgtgtcaatcaggttttccccggctgggtccgggtttaaaggctgctgctgcgcagggcgctcccatggtgccgcgcggcgggcgggtttggattttaaatccccgcggccaatcagtggcgcgcaggcttttgtaacgttcccagcgccgcgtttgaattcggggaggagcggagcggtgcggaggctctgctcggatcgaggtctgcagcgcagcttcgggagcatgagtgctgcagtgactgcagggaagctggcacgggcaccggccgaccctgggaaagccggggtccccggagttgcagctcccggagctccggcggcggctccaccggcgaaagagatcccggaggtcctagtggacccacgcagccggcggcgctatgtgcggggccgctttttgggcaagggcggctttgccaagtgcttcgagatctcggacgcggacaccaaggaggtgttcgcgggcaagattgtgcctaagtctctgctgctcaagccgcaccagagggagaagatgtccatggaaatatccattcaccgcagcctcgcccaccagcacgtcgtaggattccacggctttttcgaggacaacgacttcgtgttcgtggtgttggagctctgccgccggagggtgagtgtcgctgctggggaactggaactgcctgcggggcagttggagcgcccagacctggagctgctggaaagagtacccagcaagggagagcctgggacttggagctgctagagaagggtgctgggagcctcccgcttacgtatggaaagtgtctttggtaagggcttcttggctctgggagctgctagaggagggggttccagtgaagtggagtctgagtcatgttgctgatagggaagtcagcttctggacgcgaggtgctggggggaggggtgctggtaatggacgctagggccctggagtacccagggaggagtcccaggttagtgatgccgcgccctgggagcttctggggtggagctgggtcagtgggggggtagttggagccagacttcgggccttccgggggagatacgagtcaggaaagggatctggtgctggggactcggagcttccggagtggggctgagagaggacccccaggtaaggggggaagctagtaggagaaggggtgctgcgaatggttgtggacagtgttaaggcagggtccagatgccgctgtgctggagaaggaatggggtgggggcatagggaaggagagaaacccaccaagacccctctttcatcccttgggagtccagagtccagtcctgtgcttcctttgcctggtaaccctctcccttccccaccggcctcaatccacctccccatccctcctgccctctccttcccacccacagtctctcctggagctgcacaagaggaggaaagccctgactgagcctgaggcccgatactacctacggcaaattgtgcttggctgccagtacctgcaccgaaaccgagttattcatcgagacctcaagctgggcaaccttttcctgaatgaagatctggaggtgaaaataggtgagttgctgagcctgcaggggtgcttgacatcactacaagaggctggaatttggaggaggctgggagaaaggaaggagacaacccacaagtcagtatcttgcctacagatgcattatttttttgtgccccaatgcaatattttttttttacaaagaatttgaatttgtttttattttttaaattggaaggtttgattgaacaaaaagtttgattcagaactccttttaaacaggtgaaagcttcagtaatacgaggacagcattttcttagggcagccctttgctgggctggaaaacagctgtccccttcagacttctttgccacagtctctactcctccctattcttcacagacttgccaagtcttggaggttaacttgcttgatccttgaaggcattggagttttactatccctgtcagttcctgtttcaaagcatagcccctttctaaaaggaggggtgagaagtgtcactggaggcacctccctggtgtcagcatgggaggaagattcctgggcaagccttgctacatacaaggagcagaggcttgtgggatcagatggccctggttctggatggtcaaaccttaactagccttctgcattgacagatgtcagaggctggcatctaagtaccaactcttcctccctctgtcccaggggattttggactggcaaccaaagtcgaatatgacggggagaggaagaagaccctgtgtgggactcctaattacatagctcccgaggtgctgagcaagaaagggcacagtttcgaggtggatgtgtggtccattgggtgtatcatgtaagttgggagttgtctctggaccaacctggtctcagcaggggcaactttgggacatcctacctggctgaccttttctgtggacctttcggcctgctttacagaaagcctactccaagggacaagtcatccccaaacaaagcctaattgtcatatctttccctgtcactggtgtatcctgtcggatttctgcagcctaggtcatgggtacagcggaggaggaggagggagagtctccacaaccttactgtagtcctttgctagagttgtccacagggcagcatcaccatcatctgggaacttgtatacacaatctcaggacccagactacttactggatcagaatctggatttttaacaaggtcccttggtgattcccttgcacaataaggtcttaaacaccgatgagcattagcatggtgggggaaattaggccaggagttacagatggaaagatgatgtgccagtggtctgtctggattaagaccatcagcagcggttggtggcaggcagaggcttgggccttttcaggtgttatctttcttgttttgggcctaggtactggagagttagaaatgagttgtagcaatggctttcatacgtctttgcagtggggttttttcaaatgaaaacttgaagacttaagtacagaactgctaaaggtggagctgcttctgtaagcgcaggtagccctttgacctgttttgcatgacaggcagcatctgaggcccttgcacagagtcctagatgaccacaggctatagctaaaaaatcactggcccttaagaatcctggtctcaccatgtgtattctgctgagggcttattctagccaatgtcatggcttctggggctgctcagtggacttagggattgtcttcaggggccccagagttagagtgagtgtccagaggatgcctgacctttgttctgaccctgagatgatttctctcatgtctgggttgtggctgggagactggtgccaaatcctaccttgtgcttacaggtataccttgttagtgggcaaaccaccttttgagacttcttgcctaaaagagacctacctccggatcaagaagaatgaatacagtattcccaaggtgactaatgatgctttaagtttacatttattttgttttccccagaagctgtttatggagcccagcaatatcctaggaccagaaataggtctatcccacctctaaggtagccacagagcttgagagggcctgtgtctgaaattgcatacagaacttgacatgtatgtgcacataagcattttttctagggggagagagttggcagattctcaagagattgggtaacccaaaagttgtgtaaaaagcaaaaaacaaaggaggtaggaaggagtaggaggcaaaagtgcttaatctttagaaatggtttatcttaattcaaatggattctgccacttagcgagatcacattgggcaaatggcctgcatcttttttttttttttttttatttgaggtggagttttgctcttgttgcccagtgcagtggcatgatcttgactcactgcaacctccacctcccaggttcaagcgattctcctgcctcagcctcccaagtagctgggattacaggcacccaccacctcgcctggctttttttttttttttttgtatttttagtagagacggggtttcaccatgttggccaggctggtctcgaactcctgacctcaggtgatccacccgccttggcctcccaaagtgctgggattacaggcgtgagccaccatacccagcctggcctgcatcttctgaaccatagtttccatatataaagtggagttcctgccttggagcacctcacagagtgccttgcatgtggtgagtgctctcagaattatgaatcactgtgaatcccagggcttcctaatggcatagttgtgtgcattttctttttttttttttttttttttttgagatggagtctcgctctgtcgcccaggctggaatgcagtggtacaatctcggctcactgcaagctctgcctcccaggttcatggcattctcccgcctcagcctcctgagtagctggaactacaggcaccagccaccatgcccggcttcttttttctgtatttgtggtagagacagggtttgaccgtgttagccaggatggtctcgatctcctgaccttgtgatccacctgcttcggactccctaagtgctgagattacaggcgtgagccaccgcgcccggccatggtgtgcattttcacaaccaccaacagaaatacatttaaaggaatagctggttcctgcagaagcctagcacacagccagtttgaagtgtagtgtccttgtgtgaagccaggaggcctgtcaccataaggacagacatagtaaatccatcacaaagtgtcagttcactgtcagagacagcatggaatcaagccagctagacaaggccttcaccctctctgtgcctcactttcctcctctgtgaaaaagggatgataatagatccccaccccttagatgagttggtgagggctaagtgagctaaacacaggagtgcttagaatgctttcctggcacatagtgagtgctaggaaagtgagttggtgttcggccacagtccattgacccttctgtcaatggtgctcagtaaagctgacagtggagaacttggcattgaaccaagttgtgaaccactgacctgtggtgtatttgagactgggggctgcatgtgggctggggacctgcagctcctttgaggccgtactgtactccaggtccccttcacattctgcttatggctgtccctctctctgccccagcacatcaaccccgtggccgcctccctcatccagaagatgcttcagacagatcccactgcccgcccaaccattaacgagctgcttaatgacgagttctttacttctggctatatccctgcccgtctccccatcacctgcctgaccattccaccaaggttttcgattgctcccagcagcctggaccccagcaaccggaagcccctcacagtcctcaataaaggtacaacaagggtctgggtaagagagcagaccccccagagaaagcccaggttgtaggggtgtgtgcagcttagtccctggccctgagagctcaggtgtggagtaggacaggcctctgtccttcaatccgtggttccaatgcccatctgcttctcggccctgccaggaaagactgaccttaccatggctggataaacgtaccatgcccaagaagaagaaaatggattgaatgccaagcctgaaaaattctttcaaatcactttaattaatttaattttttggagacagggtctctcctctattttccaggttggagtgcagaggcacaatcacagctcactgcagctttcaactctagggctcaattgatcctcccatctcagcctcccaagtagctgggactgtcaggcatgcaccaccatgcctggctgacttttctaatttttgtagagacagtgttttgccatgttgcccaggctggtcttggaactcctgggctcaagcgatcctttcacctccaccaaagtgttgggatgacaggcatgagctgctacatctggcctttaaaaaaatttctaacactttttcatgattcattgaaaaacataaaaatttccttttttttgtggcgtgatcccggctcactgcaagctctgcctcccgggttcacgccgttctcctgcctcagcctcctgagtagctgggactacaggcgcccaccaccatgcccggctgtttttttgtatcttttagtagagacggggtttcactgtgttagccaggatggtctcaatctcctgacctcgtgatccgcctgcctcggcctcccaaagggctgagattacaggcgtgaaccaccaggcccggccttttttttttttttttttttttttttttttttttttttttttgagacagggtctggctctgtctcctaggctggaggggagtggtatgatctcgatttcactaaggatacatagttttaaaaagtcacttgaaatactttttttctctgtggatatatcaccaatttgatgtacaacttcagttcatttttcagttttcaatttttaggtattggtttttcttaaacttcattttggaataattttaggcttatacagaaaagttgcaacaacaacaaaaaactccccagagttcctacataccttgcagcaattattacagtggaattttttttgagacaggtctcaggacttgctgtcacccaggctggaatgcagtggctcactcatagcttactgcagccccaacatcctgggctcaaacagtccccctgccttaccctccagagtagctaggactacaggcatgtgccaccatacccagctaattaaaaaatttttttctttgggaggccgaggtgggtggattgcccgagctcaggagttcgagatcagcctgggcaacatggcgaaacgctgtctctactaaaaatacaaaagactagccgggcgtggtggtgtgcacctgtaatctcagctactcgggacactgaggcacaagaatcacttgaacctggaaggcggaggttgcagtgagccgaggtctcaccactgcactccagcctgggcaacagagcgagactctgtctcaaaaaaaaaaaaaaattttttttttgtaaagacaagatctcactatgtcgaccaggcttatctcaaactcctgccctcaagtgatcctcctcggcctcccaaagtgttaggatttacaggtgtgagccactgtgccctgcctagaatgatgttctaatggtaatttttcttttcctcactttttttgcatttaataattggaattcttctgtaaggaagagctgttccttctctccgattgatttatttatttggttatgtctgaaatagactcatggatatttttattctttgggctatattttaaaggattacttatttctctgcttttatttatttttttaaatttgagacagggtcttgctctgtctcccgggctggagtgcagtggcacagtcgtacctcacagtagctttgatctcctgggctcaagtgatcctccagcctcagcctcccaagtagttgagactttaggcatgtgccaccgcgtctgaccaatttttaaatttttggtagagatgaggtcttgcccacactggtctcaaactcctgagctcaagtgatcctcctgcctcagactcctactttttttctttcagttttaattttttatatagcattttaaaaacttaaggaaattttcagttacccgaaggtggagagaactgtatgatgagtcccatgtttcatctatttttactagttatcaacatttggacagactgttttatttattccagcctcctgccttttttgttaccggtgttttaaaaaattattatttactatttattattatttatttgagacattcttgctttgttgcccaggctggagtgctgtggcaagatcatggctcactgcagcctccacctcctgcgttcaagtgactctcccacctcagcctcccaagtagctaggactacaggtgtgccaccatgtccagctagtttctgtatttttagtaaagacagggttttgccatgttgctcaggctggtctcaaactcctgagctcaaacaatctacctgcctcggtctctcatagtgttgggattacaagtgtgagccactgggcctggccttgctggagtgtttaaagcaaatccctaatatcttattatttcatacccaagtccctatcatgacatcgttttttaattgaaaacttaaacattttatattatacaaggagaattagcacatggtggtgggggaataaataaataaggaaaaagacaataagaataatctgtgtttctactgcccagatataatcagcgttaaaatttcatgttatcttttcaagcttttttggttataaataagcatataaagcaaattttggggtggaaaaaaatttcttgtgtttttatttaaatgcctactgaatccattctgtggatgaactgaactactcagcccttccatctgcctggatgctgaagatgctttccattctttgctcaaagctgggcagctctgagctgctggtgccttcaagctgtttgcctgagtggcaggtcatcctgcagggccacaccgttgggtcagaggccacggcttctgaagatctgttgcctcacagtgagcactatgtgcctgtcacctgagcatggcagctgctgctctagtaaccaggcactgattcagtttccccaaagcagtggtagctaagagaatttttctttcggaagagtttcagctgtggcaggggagtcccgtgcccttcccaacgcccctgtttttgtcaccttcctaggcttggagaaccccctgcctgagcgtccccgggaaaaagaagaaccagtggttcgagagacaggtgaggtggtcgactgccacctcagtgacatgctgcagcagctgcacagtgtcaatgcctccaagccctcggagcgtgggctggtcaggcaaggtgggtactgcggggccctgggcggggcaggattgcttggggcatctggaaaaggcaggaggaggcttggccaacaaagcactggtgacttgttcaggccctgtctgcataggaccattggtttccccatttcctgatatccaaggccctgcttccgtggctcctgccgccttttctgatccgtcttttttactctagcacctcgatgtgccaccttcatacgctgtttcttttgctcagtaagttcctattgtatcttcaagacccttgaaataacagacccagatgtactgcagcctcagggctttctccctggtcctggcacgaaagcacttcttccagacaccacatggctcacactgtggcctccttcaagtgtctgctccagtgtcagctctgtgagcatctccctggcccctctgctggtgcttctcatcctcttgcccactgcatagttctccataacacttctcacccaacatagtccaacatgtccttctttgtttattggatttaaattaaggggtttgttgcatgcactgaacgtaacattttgatgtgtttgcaactggcttctgtcttcacagtttcttaattactccaaactggaaaactagatgcctctgactcttaccatgatagaagtcactgatattttgcccatacttaaattgattagtctttgcccctacaaccacagtgtaagctccgtggaggctggggttttgtctgttgctcactgaacctgcaacagtgcctggcacggtaggccttcagtaaatgggtcagtggaatgaaggagtgagtggaacttggtgcgctgtgctgagactttctctgcagagatatctgtgctgctgcttgtctgagcctgctggcagcagaggccctgctttgctcttctctggggccctaggcctctcaactgagcccaggtggggtgcccagcaggcttccctgttccctggtgtgggccacatgtgtggagcagaggggaagaggctggtcctgaccaactaactgtctgtctgtttctgtctcagaggaggctgaggatcctgcctgcatccccatcttctgggtcagcaagtgggtggactattcggacaagtacggccttggtaggtttcttccagaacaggtgggtgactcaggcacagccaggtgaccttttcagttgttacagactctggcctttttgagctcccaggtactgttctcagtgccctcctctctccatcccaggcctcccagttccagctcccagtgctccctgactccccagctttttttttttccagagacagggtcctgctctgtagcccaggctggagtgcagtggcacaatcatggctcactgcagcctcaaactcccaggcccctaagtagctgtgactacaggcgtgcaccattatgctcagctaatttttaaaatattttgtagagatggggtctcattacgttgcccaggctggtctcaaactcctgggctcaaacaatcctcctccctcagcctcccaaagtgctggaatcacaggcatgtgccaccacgcccggtcccactccccactttctattccccctttctgagacctctctccaccgatccctagggtatcagctctgtgataacagcgtgggggtgctcttcaatgactcaacacgcctcatcctctacaatgatggtgacagcctgcagtacatagagcgtgacggcactgagtcctacctcaccgtgagttcccatcccaactccttgatgaagaaggtgagtgccgtccggcccatggggggtggtgttgcagaagtgggacctgtgctggaggatcagactctaattctggaaccccttacctacttttcatccagatcaccctccttaaatatttccgcaattacatgagcgagcacttgctgaaggcaggtgccaacatcacgccgcgcgaaggtgatgagctcgcccggctgccctacctacggacctggttccgcacccgcagcgccatcatcctgcacctcagcaacggcagcgtgcagatcaacttcttccaggtgagctggaggtcaccaggcgcaggagagagctggggtaggctccgcatgcctggcagtggcccatgtgggttgaatgtggagtgagcggctcaggtacctataacctgttgtgtcttccctctactccctaacatacactggcctctgggatcgccaacccctgctgctcttctcttgcaggatcacaccaagctcatcttgtgcccactgatggcagccgtgacctacatcgacgagaagcgggacttccgcacataccgcctgagtctcctggaggagtacggctgctgcaaggagctggccagccggctccgctacgcccgcactatggtggacaagctgctgagctcacgctcggccagcaaccgtctcaaggcctcctaatagctgccctcccctccggactggtgccctcctcactcccacctgcatctggggcccatactggttggctcccgcggtgccatgtctgcagtgtgccccccagccccggtggctgggcagagctgcatcatccttgcaggtgggggttgctgtataagttatttttgtacatgttcgggtgtgggttctacagccttgtccccctccccctcaaccccaccatatgaattgtacagaatatttctattgaattcggaactgtcctttccttggctttatgcacattaaacagatgtgaatattctttttcttgtatttcctgaggggtgccagggcctgggatccagcgaacatctctgcttcatcagccccaggctgcccagcctctgccagtcttgtgggggaaagggggtgacagtgtctctctgtggaccaggctggagtgcagtggcatgatcctggctcactgcagcctcgaactcctgggctcaagtgattctcccacctcagcctcccaagcagctgggactacaggcgtgcgccaccatgcctggctaattttacaaattttttgtagaaatggggtgttgccatgttggccaggctggtctcgaactcctgagctcaagtgatcctctcactcagcctcccaaaatgctgggattacaggtgtgagccactgcacccagcctgattctgaggccagccacaggctcagctcttcagtgagccagcacggagaccatctgtgtggcatccagcccacctcacctccctgtggccccagggcatggcctcctggcctctgagtctggcgggtagtagggcaggaagaggctctcagaggcgcagctcctcatggctcggtgcgtgtggaggagcagccgtgggaagcggtttgtga

SEQ ID NO: 12 - DNA, 8292 bp, Homo sapiens
tttctcattttatttagcacaattaattgaggcggccactggccccagcgcggaaccgcaccactcaccagctcccgcccctcctggccccgcccacaggagaaagaagtagggagcgggaggggactaggcgggcgcggccctacgcctggcccgcctcagccaatcagagggtgcggcgcccccgagtgggcgagccccaggggcgacgcaaggatcgaggcggcgagctattggacacggtggttacgcccccggcctgcgcccggctcgccggcccccgcagcctcggagtgacgtccctcaaagttctcattttggtcccccacttccccctccctttcgtcccccagctaaagaggggtagggagtgatgcaaatgttttattacctttgagagcttcatctgaactgtcaggcccggagggagagaggaaaggagagaaagagcggaggagccgcggagagggtcagtttggccagaggacaggacttagaagaccgaagcctgggaagccgcgaagaaaatgccagagaggagagtcaaaggctgagagtgagagggagagagggagcgggggtggggcgggggtcgccgggcccgtttgcagaagtggactgacgagcggcgccgaaacccagccgtcagacttttcacacttagtcttttgtttttctgtgtttttcctccccctttttcttttcaatattgcaactccagtgccccgtgggccagagggcaaggcgggtggaggtgaggacctgggagccgcggggatccgtggcactgccctttctggcgcagcagcccggggcagcgtgggcggaggaagcccgcacagaggctagatctcccgcgggctggatgcgctttctccccgggcacagtgagcgtcgaatgcgaatcagccgcgcgaccgaaagagcagagcatcccagtaagatcagaggagcgccacgggctgcacaaggcgtcctttgaacctccccaaagaaagcaagccacccccaccctccaacttcaaagtggagattcggcaactaactttgctacaaactctccggagccagcctgggttttgttttgcttatttcccgggggcagaagatgagaagtagcgcactttgaacagctaggaaaagtgaggaagagagaatagccagggatcgaatctaggactcgcggaacgaaaggactgcctagcccgccgggacgcctgcttttctcggcgagctgccgcctcccgcgtggagggtttggacatctctgctgcgcagctaggcgagcaactcccggcagcggcatttttggttcagttggcagctcgcctccgggcgcgccgagtgcctctccgctcgcgccctcggcgcttccggctcctctgagccccgcggggggcaccagccagcgccctcgctgcaaggctacggtctccggcgtggccgtgggatgttagcggtgggggcaatggagggcacccggcagagcgcattcctgctcagcagccctcccctggccgccctgcacagcatggccgagatgaagaccccgctgtaccctgccgcgtatcccccgctgcctgccggccccccctcctcctcgtcctcgtcgtcgtcctcctcgtcgccctccccgcctctgggcacccacaacccaggcggcctgaagcccccggccacgggggggctctcatccctcggcagccccccgcagcagctctcggccgccaccccacacggcatcaacgatatcctgagccggccctccatgcccgtggcctcgggggccgccctgccctccgcctcgccctccggttcctcctcctcctcttcctcgtccgcctctgcctcctccgcctctgccgccgccgcggctgctgccgcggccgcagccgccgcctcatccccggcggggctgctggccggactgccacgctttagcagcctgagcccgccgccgccgccgcccgggctctacttcagccccagcgccgcggccgtggccgccgtgggccggtaccccaagccgctggctgagctgcctggccggacgcccatcttctggcccggagtgatgcagagcccgccctggagggacgcacgcctggcctgtacccctcgtgagtactaccacccgcgccccgatgcctgcctgccgtgcctgttctgcccactcccgggtcgcggcccctggtgtgcatgccgctcagtccatcctgtggcccgccccagtagtttgacagcgccggaatcacaccagttaggttgggccagggcttccagaaagggattctcgcttttctgagctcgcgtggctgtatccaagcgcctccctctctctaagtcttgagtacgcctgggctgagccggtgtgtgtgtgttcgtgtggaccacaacgcggtgagggacgtgtgtctcgtccgaggccctggctgttcctgaaacggcctggccaggaccgcaggcctggcctggattagaaagatggggaggagaggggaggagaggccactgcatctctgctttcccggctcctccctgtcgtccagcgccccattccgccttcgccagcctaacccgctgcctctcttcgaagcagtgaggcccggcagcggtgagccctccaccgcccgggaagtgagtgtatttgcatgcacgtctccgcctggggtgtccccacctcacctcttcgccctcgccgcccgagtacactcggcctgggtgagcccattgaagacagtccagcgtccccagggcagggcgagcgcttccagccgctcaccagcgctgggcccgcgctttcccacctgcctccactctgggggctggcacacgctgcgtccgggcacatttggggacatcgtggagctcaacaccctaacacaagagcgagccaggagaagagtgagatgaagggacacggcctggggaaaatgtaccatcccgcaaagaccttgcttgaggcaaactgagttgccccaagatcacgctagtcttcggggtagtaggccgcagcgccgcggaggctcccagccttccaggtggacttcagggcccagcctggggtccttttctcgctcagttcttcgcctttcagcgagtctccgaagtttcttccaagtctccggacctccttagtgcggctgagcggcagtaactgcgggaagttgcgaaagccaagtggaggttctcttgggaagcccggggactgtggcagccgggcctggtgggggtgccagggagacgctattgtatcggttttgatggccgtattaggggccgccaacaaaggctgtgccccctcccccttcccctctccccctcggctgcagcgacgttagacttgggggcgatttagctctcttgtgtgcaaaaacaaggacccctttgttgcctggacacaggttagggaagcgttgaaggaaaaaaaaaaaaatctagttattctcacttaaaggctccggggccgaacgagcaccgactggattaggaggcgagagtggcctttttctggcagtcgttaatttaatggggccttgcgattaggctctggcaaactttagcaataggctccctagctgtttgacgtcggtgttgagcagaaggtatttactgctgcgccaaacacgcggcttttaaaaaacaggtggatgtaaaaaagcaaagggagacgtgccgttagtctggaagcgccactacacttctggtgtccgccacagactgagctttctttccccacaaaacattgtttttcgagttcgttttttccccctagtgcagccgcttgtaaccgattgtttttccccctctctcgttgtttattggttctcacagatcaaggatccattttgttggacaaagacgggaagagaaaacacacgagacccactttttccggacagcagatcttcgccctggagaagactttcgaacaaacaaaatacttggcggggcccgagagggctcgtttggcctattcgttggggatgacagagagtcaggtcaaggtgagtggaccttgcatacctggagggataggtaccgcccctgtcgcgcgcgcgtgcacacatgggcacacacacacacacacacaccccaaactaacaaacagtcgcctgggaggtgcgaatccaaggagcctggggagaagttgagagcagtgaaggagggtggggactacaaaggcgctggggtcttgcaggcgggcaaactcttgatgaacaaaaggaatcaagtccccgcctttgaaattaggttaatctatatagcagcatgtgctgggggactcaccattattagagaataaaggcattactgaaatatcagcccagagaatagatcaggccagttagacagcttctacatatcctatctgtagcgatatccaagtttttgtttgtcaattcaggctccactagttatataatttcctaatgtagatcagtattacagggctactgtattaattcgcaagtaaaaataaataaatccacaggatctaaccacttgccatagatgaacctgttttttagcttagcttaaggcaatcgctttggaatagtaattttacaaatgaattgacaagattattactgaattataggcttgaatttggtttaaaataagtttattaacagatttaggatttgcactattcatgacaacaatttataattaaaacatcactttccttataattgagttgtatagtatatttccaaggaaacaaatttcagaaattttttcctaaaaaataaagggattaaacaagctgggtaaattcaatctaatggtttcttatatttccaatagtctcttttgtccttctttttcagtttgttatgtttgtttctttggggtgtaagtctgttttcattagttctattgttgcttcttaaattaagtaggaataacattagccatgtctgctggctagtgtatttccccctggacagccatcataaaatacatttcaggagtgattttgtatgtggccattaggataccatcacagttaaaattattttttgcagtaggttggtacagagcctactgcgataatctggaggtcttcatttttcaccgtaaatatgtctatatggctagaagtgaattattatagctgtataaagaaaataaacatcactttcttaacaattctgattctctagataaaatacataatggaggacaagaataaagggaggataattcaatatctttgggaaatatgttgcttcttgctgatgctttaggtaaaatatgtgtcaaacatcatgaataagcttaaaaatatttgtattaaatgtcttgagcaggaacacagttaaaataacatttgaaagaatagacatgccaattgtggaaaataatgtaattgacaatttttcacgttttaaaaataaccaatggtaattctagtcttcactttactttgggtttatgaagaacattaaaggcgatttgaagtttgtattttaacagatctttttttttttttttttgaagtgcaccatacattgcaagtaaaaactgggaggatattttttatctaccatgtttgtacacattcagatctgagataagtgaaacaaacaaatgtttaaaagtgaaaaggagaacagaagtaattggggcaaatgctgtgctttccccccacaatctataccgaaaagcaagtacgtgtcaggttgtttgaaatttcttaatttaagaaagtaaataaggaataaaatcacagccactgtggggcaacttcatgaagggggaaagttttcaacttcaaactggaaggcaggaaagtgaactcacttttagggacgctcatttttaagtttccgagttttgtttttacttttgagaactcgctcactgacaacctcaatactcttgtgttaccatcgctatggcaacggcagtcagtttgttggtgccagttactcagggggaacttggggcgacggagactgactttgacggccgagaaaagggagggctgcgagggagggcagcaggccttcggggggccgcgggagggccatcgagatgcgggagtggtagcatggcctggatctgctcgtttaattcctcgcccttgcctcccctctcctcccttttctccgccctcaggtctggttccagaaccgccggaccaagtggaggaagaagcacgctgccgagatggccacggccaagaagaagcaggactcggagacagagcgcctcaagggggcctcggagaacgaggaagaggacgacgactacaataagcctctggatcccaactcggacgacgagaaaatcacgcagctgttgaagaagcacaagtccagcagcggcggcggcggcggcctcctactgcacgcgtccgagccggagagctcatcctgaacgccgccgcccgccgcaccttcccggctccggcctccacctctggggccgcgaggggcgcggggaccgcgtgcacgccgcgcctgcccgctcctcggggcccggaggacccggccctgcctgcggggaccctttgctatttttgagatgtacatatctatttttttaaccttgaagttgtgggaggggatgtaggggagagagactccggggttgataaggcaagaaagaccaccaaatgcactgcgtaaatgtcgctactgaaacccgcagccgggccacggtcccagccgcgtccccataggcgggcagcggcctcagcgcccgggtccccctcgcccccagattttgcccccgcgggcggcggggtagggggcgccgagaggtgctgtggaagggttcacgctcaccgcatgggggacctcggagcgaagcgggcgggcgctgccacagatgggaagagggacgtttccccccccacacactgctgtgcaactaaagtaacctgttgaaggctctttgtaaataaatcgtgagttacactgactagaagttactttattgtgaatatttaaaatgtaaaatgcttttttgaatttcgtataaaaagatggactttcttccttctcctcctcccctttgaagagcgactcaagccacaccttcccttttattttgaacttaatttgagaagcgtagaatagaatgtccccaccttctccgtcccctcctctcgttcctctttcccgtttggatttgcagaatctcacctttgcccttcatctcttctcgccctgccctgccctgcccaccccctggatctacactgcgctcccgccccccggacttgaagtggaagacgtgggaaccagggagggcctctcacctgcctccctgttcctctctgaaattgcacagtcgtttgttgctatttattagtgatttaaagaaaatattggggagggaggggctacaatagcttgtatttaactcctttctgataaaaatgcgtgttaaagtaggtggtgggaattgttacaaccgctctgggtctgaaacataaaaattcatttagttactgtaattgaatttgaagtgttttgtatcataagaatactatagaatatgtaaattgttttctttttacagctaataatggtgatatattagcatctttaacctttattaatttatataaggaattcggtttgtaaagagaagaaaaccccctttgcaagaccagttaaatgtaatgcactttctgtttcaaaggataaatcaaattaaaaaaaacagtttgaagacgtctgttgccttgaatgaaagggtacagatcatctgatctcatcagagatctcaaataataaaagtcaagaccacaaaaaaaatggtatatcggtttcttgggtgaaatagctgttacttaatttttttttctttggatgagtgatgtcacatttctcattctcctggataggaaaataaaataaatgcagccccactcatggtgattcttggagagactagtctagctagctagctgcttctgatgtctgtgttgtctaatttcttcctgatcgctttttccttttccaggaagtccctggggttggggggcagttgggaagagctcatttccatatatccaagatagctcctcagtcagcccctattcgattagcgtagaggaggcagcggagctcgctggttgagtagcactgctgtttgatgctaatatttctcccccgtagctgtaagactgcagaaattgtggaaagacagaagccttgattttactaaacattactgttgaaagatgaatttaaagaaagcttcctttaactggtgtaaaaatattttagggttaagaaagcaatgtcatagcttctccagctgccgaat

SEQ ID NO: 13 - DNA, 1112128 bp, Homo sapiens
  ref <308>: DATABASE ACCESSION NUMBER: ENSG00000185737
  ref <309>: DATABASE ENTRY DATE: 2011-05-13
  ref <313>: RELEVANT RESIDUES IN SEQ ID NO: (1)..(1112128)
ctgaccgaccggaggcgccgggggcccgtctcgcccctcttccgagctccttaccgccccctccccggccccgtcccctcccccgctcctctcctccccgcccgccgcccgcctctcggggggaggggcgtgggggcagggagcggatttgcatgcggccgccgcggccgctgcctgcgcccgagcccgccgccgccgccggagcccgcgcccgcgcccgcgcccggcccgcgcggccccatgcctctgccgcggccctcgggggggcgaaggtgaagaccggctcctaggatgagtgaaggggcggccgctgcctcgccacctggtgccgcttcggcagccgccgcctcggccgaggagggcaccgcggcggctgcggcggcggcagcggcgggcgggggcccggacggcggcggcgaaggggcggccgagcccccccgggagttacgctgtagcgactgcatcgtgtggaaccggcagcagacgtggctgtgcgtggtacctctgttcatcggcttcatcggcctggggctcagcctcatgcttctcaaatggatcgtggtgggctccgtcaaggagtacgtgcccaccgacctagtggactccaaggggatgggccaggaccccttcttcctctccaagcccagctctttccccaaggccatggagaccaccaccactaccacttccaccacgtcccccgccaccccctccgccgggggtgccgcctcctccaggacgcccaaccggattagcactcgcctgaccaccatcacgcgggcgcccactcgcttccccgggcaccgggtgcccatccgggccagcccgcgctccaccacagcacggaacactgcggcccctgcgacggtcccgtccaccacggccccgttcttcagtagcagcacgctgggctcccgacccccggtgccaggaactccaagtacccaggcaatgccctcctggcctactgcggcatacgctacctcctcctaccttcacgattctactccctcctggaccctgtctccctttcaggatgctgcctcctcttcttcctcttcttcctcctccgctaccaccaccacaccagaaactagcaccagccccaaatttcgtaagtaaacactgtgtctcaactatgatttactactgagtttcccttctgccctcctgctgtctttttccctcgccgcctgttttctagcaagccccctcccccatcccaggtttggggcagagtgagagctgattaaaactggccaccagcggggaagaaggtgccagcctgctctggttctgggggggtgggggcgtgtaggaacgggagggagattgtcaggctccactggccccactttagcgggtcccaagtgagaacagatctcccaactcccttcaaagggttaacgcgagtgcgatccctcctcactgcagacctgctggcgagctgccggatcccgctccagtagagggccagggagggagagagggccttcccgaaggcactgagccccttctccgcccgccggtaggaaggaaagaaagcaaagcacatgcaaattgaccgacgataaaccacaaaaggaagttatgtccttgtgtggggtgacgagttgatggagataatggtagaatgttgctgaggacgcttccagcagccctgacctgggcaggaaccagaaagggttaattagaagccactgggagacttggggaaaggaggcgatccaaggcaaagggctaaactgacctcctagcctgcctgtggccattccaaggtgtagacatagattctgtgaccgccgagagtgagttaactaggaggaaatatgaagggagccctgcagagctgccacctctagggtcctgacgaaggaggagtttttttcagccctgccaagcctttgcttttgttccgttcccaaaggtggggtgtgaaccttatctcctctccctctgtgcctgaaaaatatagacgagttgagagttttctgcactcaagggtgagaacatccaaccgtttggaaacatgtcaccgttagaatgtagcatcttcaacctgggctcagtatgagccagtatacccaaagcatgatagctttctgtttatttgtatagaaagtgcgtattttctcaacatttttataaatgttgtaggtgactaattgacctcccaccccaacccccaccttgttcttattcaaaggaaatctcaggtgtcttttaagctgatctgatcaggatatgggaacagtttgtgcaacctgtgaaggttatttaggacaaaccccaggctgctagttcaagttctgtgcaaggctattttgcaaaaaactgtctggttatgctgtctttatattgtatttgtgttttgagccatagcatctgagataaaggaagagtgttcatcattaactcttcagtgatgatgggaatactgggtttgctttcagtcatctgctaatttttcatttccctgccctatgatcttaccctgggtgttacttaacccttgaaacttttttctttttaaagaatgtagtgtatttgtaagtaaggtccaggagagggaaagggggaaaaaaaagcaaacctactttgctttggaaaaaaccgtctagaagataaattgggagacaggaaggagggaaggaaggaatctgccacaaaccagaatggcagtagagccagtaacttgctgcttctctctcctttggctgaagcagtcatttttgagagcacattttcccaggaggtgtttagagcctccactcaacaaatctagcttgtgttttgtagaaggataaaggattcatgagtgtatgtgtgaacatattcaatggattgaaaatgagtctaccctgaagaccccagatttttgatctgctcttttgatgcagttgatagaataatggagtgtggtatacctccaacccttgtatgcgttgggagaggagggggactacacacggtaggggtatttcatgttctttctcaattgatttccttgtgtaccattccggaggtctttaaagaaaagcccaaggtaattatttctacccctctatgctctcttcctacattccgtggacgggaatggcagcctgtttaataagtaatgattattgacagggccctcagccccaaggaaaagaggggaaaaatctgtaaatggtgtcaatgttcacatagacatataagcagtatttgttgtatttgtatcttagtttcagctctttctcttttttaaacctttacaagaagttgaattaaggtatgtaatacaagtatgcaaaatccagctgaaattgacctggtttgcatctataaacaagggaaattttaaggaaaagtggattatgtagttttcataaaacgtgtttaaataggcaagttgtatggtgacttgaagaaagaggatagtttagttatttttttcatccaagattgcaggatgattaacaaaaggaaattaagatttcatttgagagattatcagcagtgctactgtaggatgaaaaaagcctgaatcactggtgttcatattttttttacttgtcttgattatgcccgtaaagttcccaggagagaaattttcttttccccagctcctacctccatactttagtgggtctttccgtcctttcttttttttaaatgaaagtaatggattctgttgtagtacttgaaaaaaggttaaggatgatgctttcgttttttgactaacccacaaattctttaatggccaggatctttgctcttgcattggatacctgaaggcttatggaatgaatgtctttgtgttcatcttagatcaatcagaaggatcctgtctgtaaggatcctgtctctttggagtggaagaggctggttcactgacaatgaacatgcttgctaatggataataggattttttcaagcaaaagctgtttttgctatgggaaaggcccagttagagaactgtttctaattttctgtaggaataaagacaaagaaggattgaactttaaaggcaggaggagaaaggagggtttgcaagttgattcttctcttcccgtcctccaccgtttaggccgtgagctggaccaaaactttcttcagcgttcctgggattcttgggtttccacttgcctagtacttgcttgcacttcagactctaaaaacgaatgtcttaaacatatcgccaggggagattatttcaccagaaacatctttgaagcattttgtatttgaaagtagaggttaatttacaagtttttcaagccaaagggaggaggtcactacagacagtagaaaacagtgattttgaccaatgtacaatcagcctttcccttttacagcgccttcaatttcgttttcagatttgaaatatagttgtacaatgctgccaatgcaaatgtggattgttttagagacatagaattcttttactaagctgaaaatactgtttaacaggtggtagcccggagtcattggctaaattcaaatactaaagacaaagagcctctttttataggtgtttctttgggttagatttggaaggtatatggttaattataatgaacatcacaaatatctaatagtgtatttaagaagaaataaatgtagaatgtacatttgatgtttaagcaaggtatggaggcaattttaatttaatcatgtctatttctataaaactttacctagtcatacctactgtaatttttaagagaggcattgataaaatcaagtattttcttatttattcttttcaacatcttcattccttaaataagggtacacttgtttgctttataagcagcctcagatataatttgtttaaataaagttacttctgtacattgtattctctctacatgagtcgaggcctttaaaggcatccaacgtagaaggtactgaccccaatcatgcatggtagccaaagtgagaggattcagagctcaggatcaatatttcttatgaaatccaattgagagcttttttttatgagcacaggctgcaacctgagtatgttttgatttcctttggccttaattcaggattatgagacttttctgctttaatcaattatgctgtacaattttactgttacacacttatgttgcacttcatggtcctaattaaaaaaagagggcaggggtgggtgtgttggcaaggatatttttagggccctttttagtttggactcgttggtctccgtgcattaagacaatgcggtttaagcattcctccccagttcttcagactgaagtgagggataggaggtgttgttaattgagagtcccttctgcaggattaatttgtgaatccagctacagttatatttgtgctattttcaaaacctgaccaaaaaaaacaaaaaaaaacccagctggtttctggcaatttctcgctgttactgaagcttttctaaattcaggttgggcaacaacaggagtgttggtgcagtttgaaatcagtgccttcctgggagatccaggatgtagaggaataccatctctcctctctctggagctactttctcagcccttcctcccctttgtacacaatgagaagaaagcttattttcaacttgcttttgtagaaattctttcctcataacctctcatctccaatgccaaacatatctcaatattctatctgggatgtcaaaaatggaacatgaaagttggccctgaagtatataagagcaagggaatagtcataaatctaagtctgtaaaatgcatttgaattgcttctgaatagaactgaaattcatttttctttctttctagctgtttttatctttagactcgtgtgttgggtaaggacagagctggtactgcgttgacaaatacattttgagatcctagaaattttacttatccacccaagaaagtgttccctccagaaccatatacataatgaagtgagcaatggactctatttgaaactttgcaatatcacaatcaaaacttacctacataaatgtttcctcttcatgcaattataaataaaatcattagacacatgtttagtttggttttccatttcactcttcccctaagacttcctgtactcccacctgccagtattttatagttgaatcatggctctgactgaaggctcctttcaggcttttgtgttttttttgtgttttttttttttgtttttttgcccttttttccttagcctagagtacaaggagtcaatactcattaaatgaaatttcttagatatgcttaacgtcttgcttcaagttgttttataagttaatcttttgggtaagttagagtgcttaagttgatgtagaaagttaaggaaaaaaatactcctttagggaactgagttattaaactgtcttggtgatttaaaacaataattaaggattcttaaaacctgatggaagctaatggtcatttcttttcccccatagattggtatacaaatcatattaattttggtagcatttttatctgattccacaacacagttgagcaattgaacataagctatcatatacattcatataattatattttcataatatatgtcacatgtttcaaatgtttactaagtatctatctgggggcattgcaatgctgttaagtaattggttgactccgaaagtttgtaaaagtaatggttcataaagcagacaattaaaataaaacttttaatcactacaacattcagcctcccatgtcttgatgttagggcgaaggctttttctaagtatgtgtctactggtttaagcttagcatctttgcttttcttttttttttaattagccacacctgtaactatcagctttttttttcttttaaaagacactagcgaaggaatccgtatgcagattctttataaatacaataataaacccttgccctgggaatctcttgcagttttcttgtctatatgattcagtttctttttttatgctttaaaaaacaacttaccttttggagtttcttcaaagcattcaactacattttaatagaaactacaattatctttcatttccataatcatatatcactggtttacataatatttaagtaaattacataattagcataagaacaactgacgtaaacaaatctattatcccaactgagtactgtaaagtgcacaactcagctggcagttgcagcagagtgtaggtttccttgagcttggcctggtggctgtgtccctttcactgtgcagtgggcctctttggtgtgttcctgccaggcagtgtggtggcagccagttggctaagaggagttagattaaggaagtgattcctttaggaggtaacagtattagaaatgagagtcagtcataaccatattttttagggactctcatggaagggtaacaaatatatgtgtgtgtgtgtgtctgtgtatgatacatatatatatttataaacaatatttgtttgtatatttctatataaaacctctagccgtgaattctataatagctgtgcaacctttaggaactgatacaatctctctgaagtttaacttcctcccctggtataatgaggttgatgacaataacctgacttctatgccaatcccgaaagagtttataagctgaaaaacaatcactgtttttatgtcaagtgaaatgggaagtagatagactggttattttcatccaagagcacatcagactattgaattcggttgaaatattggagctggtttgttacctagcttgagggatctttcatcacaatgaaagattattgttcttatatgcccttgggtttttcttatattcctctctgatatcctggcacacacaataaaatatagtgtggagtcctacctcaaatcaccttggaagttgaaccacaaactggaggtcatcatttctcattctttgcttggaaggtgttttttaaagcctatttccagcatatgtttatcaaagagaggagctgaaatttgggagaaaatgagtgagattcctgaatgatctggaaatctgaaatctaaacattcttgataaagcaaaatatgtcctaggtgcccttttgtgccatccctacactaattgtcattgggtctttagattttggagagaatttgtgtgaaaataggcatgtctgcactgcattcccttggccacttagcagttactgtgaattagattctcaagaattaataggttgattgtatccatcaaggagctcttttaaagatactgtttggatttgtactttggggaactttaatattagcattttggaaatatatttcttcaaatctgtgtttgttggaaatctcatcctgaattatatcttaaagtattactttttgttgttataagcttttatttctcaagacaggttggtgattgtacataaatcatagattgccattcctgggcctaaaaagggatcagtcagaagcaaacctacaaactgaattcagaattaagtttaataatggaagtttagcagcttccagtgctaagattttgtctttgaggccttttcctggaagtgatagtgtgtatcatggatgcaatataggccatacgaacatttttttaaagaaaaggtcagctgaatccatgcaactactttagcattagtatgttacagccagggttatgggaatagaatttttatgctaaacgtttgataagaattcttaaatatatcagccttcctcctcagataccttcctatgactacatgcaacctctggcatgatttcctgtgaattgccagggagctagaaatccactaaaagagaaagccacaccctcatcatcatcagattttcttcatttttgtagcttgaattttacttttagtaatgtagaaggattagtcacagataatcagtcttggaaggggcttaagaatttaagtaataataaaaacgacagctgccatatgtggagggttaccgtgtgcctgggcatgtagcactgtacattcttcgtgttatttatttttgaaataaggattgaaaaacaatcatatctaggcctgcagcctaggtttgattatctcactgatagagttaatcaagctgggcttaggatatataatttgcctaggacttgcagaaattgtttggataatcaagaagactggaggagtgttttacaggtaatctctccccacctcagtcttacttacctaattcactgttatagtgtcactatatccatttgtacattgcttctgtcaagcacttcacacacagatagtggcatttgccactgtaaactccataaatagctcacctgcactgtacctgttctttgctctgatatggaggaatctaactagagaaattgcctgggttttctgtctaaggagaaattcagatgtttcggtaaaagataaagaatatgttgttctgaatgttgtcttcttgtttattttttaagttttgttgatatgtaattgatatgcaatgtgctctccatacacatccttgggttctgcatctgtggatttaagcaaccagggatcaaaaatatatttaaaaataaaaacaacaacacaacaattaaaaatacaaataagaaacaagtatagtataacaactatttacatagcatttacactgcttgtaagttctctagtgatgactgaaactatatgggaggctatccttaggttatatgcaaataccaggccattttatgtaaaagacatgggcatcctaggattttgatatcctgggggagaggaatcctggaactattcccccctggaataccaaaggatgactgtacaaaaaattgtacatatttaatgtgtacatatcgatgagtttggacatgcatatacctattaatgctgtcaccacagtcagggtactaaacatatccatcacctccaaaaatttccttgtgttctcttgtggttttaattttgtttaggtagaacatttaacatgaaatctatcttcttttttaagtatgcagtattatattgttaactaagtactatgttgtacaacggatctctagaacttattcctcttgcataactaaatctttgtacccattgagcaacagttccctacctctaaacttctgttccttgatctttttaactctctattttctcttatggctgcttgtaggtgattcaatgtaacaatgacagaaaacagttacagactttattcctctgcttcctaaaatccagtcaaaattgccttctctgcccattccaagcttacttttggttacaatagtgactgcagtgtatgctgagactgatcaatggaaaagtgtcagggaacatttggaatgatagccttttagttctgtagacactaaagtactgactctaccaaatcaatgatgggagttggagctgcatgcaatgcctgctgcagaacatctgaattccatcttggagccacactgcgaagtacccatcactgattatctaccagttctaagaaggggaacattggtgagaccttgatattctgccgggggtactacaaactagacccaatcattgcttacttgcttgacatttttgtttgccaagtgttcttttagctagaagaaaaaaattctcttttggttaaagtaaaagatagttgagattgttacttttacaaacttataaaaataaaatggaaatagatcaagttctaagatcacgtgacactcatttgaatagccatgctgaaggataggaatactgtagtgtcagaaagattgtattgtcaacatcctgtaagactgtaaatgaatcccataaactaacaatgacagttgtgctcattgttagtctatgaggggggccactggggttgtttgcccaaatttattgttagaccaaagcttttttcagcatggtggaaaaatctagagacaccagaattttttaaaaaatgggctgtagaaatgtttatattaaatgatagcttgactgaattctatttcattgacttttcagtatgatactctctgtttctggattaaaaaactaacacatttcgggtgtgggggaggtagagcatcaggataaatagctaatgcacgcggggcttaatacataggtgatgggttgataggtgcagcaaaccaccatggcacacgtttacctatgtaacaaatctgtacgtcctgcacatgtatcccagaacttaaataaaattaaaaaacaaaaacaaaaacttctgacaaatgcccactccatgccgagcaggtacagttggtagcacttctgtcttaaccaaatgaaagctgccttggttaacaggtattagttatattagctcccaaacctgtttatgctgattgtttttgttactgtaattgggtaatgcatttaagtattctataaatctgtgaattgtggtttctattaaaacgaagttcattacattggatataatccataaacataagtcactttaaaaaaagtgcttcttctacttgacaaagttgtgagaagtttaacgagaatatatttatatatccataagaaatttgcacttgtattgtttcacatgttaagattttattccacaataaactaaactggaaaaatcacattatacattatgggtatggtttttcataagaaggacaacagatgtttactcagagaaaagccttgagctctataaccaaatatttggcaagtgaatgtgcatttgtatgttttaagttaaaataataagtaaaataaattttgtttacccatgtgatagatattacaaagctattaaattttgttgtactaattttaaagctttcgggaaatgtttggtatataatttttatctaaaactttgggtagaaaattatataagatatccatgatattaagctttactggtcactagatttaatatatagtaactgtattcaaaggaagtataccaaattgttcatggtagttctttctggattttggaatagggatgctgtttaatttattgtacttttttgtattatctaagttttagttattgttcatgaattatctttttttctaattagaagttgttatacttttgaaaaatgtaaagaatatactccatgaatcagttcaattattggtcttggttctgtgaagattgttttttctttatgtctaaagagtttgtttcttaattggtggtgtcagcattaaaatgttgatggagttgggttgctgctgtgaaatgcagatgtgtagaagtgcaaatgcatttccatttgctcatgggaaataatgccttattgaaggcagagtttcttactctgggcctttgatgattagccttgactttataagggtatagaagatgggagtttaatgagatacttaatggctcttccagtctgcagatgttagacagtcttagtagtattgctatacaaggatatagccaacagaaatcaataagttatatacacatattaatcaactatctgatctattccaaggatcaaatgaaaagagaacacaaaggctaattgacagtgctgagtactagaaaggagatgtttggtcaaacatgaatgggtgggataaccagttcaaaggtttactggatgctataagcctctcccagaatcataagatatttattcttatattaattttcagtggctggaacatagacagactccagagtccataggagagtggtgatttgtagggcacatgacccataagtttggtgatgagttgtgctcaaagtccttcaaatagttcacaaatgcaatgttggtccaaaagagccagaacaaatatatgattctatttatatactgtgtaacaattagaagtcaagatggtgattatctttggggaggaggggcaggtagtgaatggaaggggacccaggtgtaggttttcctgtattgataatattgtgctgcttgatatgggtgctggttacatgagtgagttcacttcatcaaaatttagtaacttctatacttttgatttgtgcactttttgtatacatcaatactaacttgaaaaaataagagaaaacttcaggaacattcctttggcctttaccacttcatgcaaccagggtggtggcctgagtttataggtttttccatgtacagagactggatggtagctctgaaagtttgttgttggtgtctcacagtccagcagatgcaaagagggtcttcctggcttcagcattttcctttgttctcaggatcccctcttagtgagacttcatgcaaacacccacattcccttttgacgtaagcctttctgagtggacaccttgtatttatattcaataaaaccctatttcactcatatcaggagtgttcctgatataacacattgcgacacttttcacatatcttaacacatgtaaaaccccacttgtatcctgagaatggcattattacagttctgcaaacattaaagtgtgatatacacaagaaagataattcatcatctgcatctgtggtttttgttgagaagatcagaagatatgcaccaaagaatcattaagtgctgaaatgtgtgattccaaatgaaaagcatatgaggccatttcagaaagtagtgcttagagggagaaaggtagtttcaagggagaatttccttaggcagagtaatagagaagggaggcccagggagggaaaggtcattaataaaggtagaagtttgcatgtacccacctatatgggagccagtgagggttctgacctggtagacagacggcctcaccttttccttggagcagcgcctgattaaggagggagggttttggaggacacagcttgattctatgttaagccacagtcagaatgggttgcaaggaagtgatacaatatctgtggtattttcagaaggtgcgaggtttccaggatgacttggagagaggaatgagcagcgaattttaaagattctctaaggctaacttgttccaaatcatttaaagatattgtctctgatttgtgctggatatatttaagtattgacttcattccaatgcctcttcaaagcgctgcaagaagcaatagaattggcatgttttaaggatgtttagtttatccatagtcgcatcaacaaagccctagatttaacccaaaataacagctttcaaatacctaaaaatttgcaagtagagatacaagaagaataacaagaaggaactcttgatttcactgcctcacctaaattaacctcttactgtctttaggtttttcagaggcaaaaactcctttatgaattgattgccacatcacccttctggttccatctgaggtcttctttgcagaagccactcagcaccttttggaattgaatgctgacatcgcatcagattcaaaaggaatgctgctgttgattcctttctgtactcatcacatggtgaggaatatgctgggagtctgtataagatgaggctcttgcacggcctgccagagagtgcctgtcatggactggagaactgcatccgttcatttacatatcggcagctaaaattagtggagtcacccacgtttttcaccctaaagaagaaccttcagataagaatccagttcatcactctcgcctgctcaggcttacttggttgctccttgttaccagacagaggggctatagcgctgtgtaagagcaaatgttaaattagtattaatagccaatggcatctctcttctatttttcactgatcaggtaattttcactgatgtcaacatttataatacatcagctgacatatacaagtgttatttgcttggaatatttttagtttatctattttattgacttagataaagatatattttttaaagttatttgttcaggtctttttgtatttgatcagaagaggtttttgaaaggaaggcgaagctgtagatcagggttttaacaaaatgagcatcaaatccaaatctgtgtttctccttcatcactgagttttgtaagcttctaaatgaccttttgtggtaccacactgatgctcatcttgcattgtgagaggctctgagtaatttatgataaataatgaaatgctgtttcctccaatacactgcaaatggctgagtcttgtaaaagtctaaggagctctattacttctaaatgactagataacacaaaaatgttaaccctaaagagaaaaggtcaagtagaccacgtgcttgtgagccacagtccttctgcctggtgccttctgacaggctttctgcatctgaactctgcagggactggcacctgaaacattactttctagaatggcaaggaagggtttaagcctttcggctacttggattggctagaagcaatagtggtttgtttggagtggggaagggagaaacttgccgaatccatttaacatttgaaaccctaaattaatttttaaaaaaaatctgttaccagtggtaagaattttgtgatgctaggaaacaacaatttaagtattttatttgagcactgatataaaaagaaatattaaaaagcaagcagagtaatgttaatctgtaggaaactatagaaagctgacatcttttcaaaattaacctttgccatgatgtttgcactctcttgctcatatccacgtatacaaaaataaatacatagtgaacatattcagtctacaactctcagctccctggtattccacagtgtattcctaccattggaaaatactgtccacagtgaatatgtgtgttctcatcctgattgctgtaaaataactgcatatctaagtgttagggtttgaagactttaattgctagctacagagtgtctttatgtattgcacttccattttgaaaattgaattaaattgccggtcagtgaactctttataatgacaggagagtgtctatgcaagcaagccattgagcagagtgatctttggccagtgatacttttaaactcagacactttgctgaagtttgccactgaattttctcacatttccccagatgttattacattgccaaatgaaatcatctgttccccctagtagaactgcctcctttcctccagatatcagctacaaggtatgaaatgaattgcataaaaataaatcacacatgctgcattttgggaagagtactcttgctgatccattaatttcttttcactgctgagttgggaagtccactttaatcttcaattatcagtaacgtgcaattggatgaacctcttgacctttccaaaatagagatgctttcatgccaggaaatttgagctctttgaacatttgagaatatttttgcttttgatgaaaaaggtttgttgtcatgtgccgtgggagaaagagattgaaagaaggaaggttattcccaaaggcctgtttgatgattggactatatggctctattcctgaccatgtactctctgtaaggtttggcatggacagcaatgtgctgttggcaatatggcgcactttaaggtatttaagcatggactcaggagtttgtagattatccaggcttgttacctcatctccatatgcctagtctaccacttccacttagatgctctgccatgttgcaaactgaacagaagaccctgatgaacacaaggaagatgagggaggtgatttccatggagactgtggagaggctggagggtcttgtcttagggaagtttatcattcctttgcgcaatcttggtatttgtgacgtttcttttcttctttgcttctgtggaaagttggaaataagataattgggatagtggtttttgaaagggggaaaagtaattaagacacagtgggatgcccctgcctagtttgggaatgcaggctcagctctgctcctcaattgtttgagaccccagggtaaactacttgatctctagaatttcaggctcttctgtaaatgaggctgttggacaagatgtggcaaagattccaggaggccagggttttaaatttgagattagaatcttagtggaattttttgaattatggtttctctggctcgctctctccctacctcccttcctctgtctcgctctgtccacacacatataaacacacacagatgaagattttgtttttgtttggttagtgtattttatgttggacatttgtcagtttggcatttaataatatccatgtttcaatgtgatacatacgtgggacttggttaagtcctaaagtcagatgaactttgcttgtttacaactttaaaaaagaattccatccccttcttctgggagatgtagagcttggtagccagctataggtgtgctattgccaagtgtgtgtgtctctttgtgtgtgtatgtctgtgcattatacacacactttatgtaaatatatacatatatgtaggggtatatatatatacatattccaaaaatatatatatacatattccaaaaataagggtatgaggagccctggaggaattgcgggcacacacaaaatattttatttgaaagtataaataaattcatccaattctagatatgatatctcacccccttaagtaaatggaactcttacttgctgaattttacaaagagtgttacaagaagaacagagggctaaaaaatggtattcctagggccctattgtaaatatacctcaacgaaaggcaatatttcctgttacgttggttggcaaggggattttgatatcagaatgtggctccatctttcacattagaacatagctgtacgtggagatagagagtagatgaatggttgccagagactgagaagggtagtgaggggttacaggagaggtagggatggttgatgggtacacaaaaatagaaagaacgagtaagagctagtatttactagcataacagggtgactgtagtcaaaaataagttaatcgtacatttaaaaataactaaaagaatataattgggttgttggtaacacaaaggataaatgcttgaggtgatggatactccatttaccctgctgtgattatgactcattccatgactgtatcaaattatctcatgtaatccataaatatatgcacctactctgtagcaacaaaaattaaaaattaaaagaacacagctctgagctgcgacagtcagtgacatttaattcaaactcaaagtggctagtttatcatttttttccacttgcttttcttattattaaacagaggattttcactataggaaattagaaaatataagtaataaacggaaagtaaaagtcaagtgtagttctaccacccagagataattactcttctctttctgttcaatattagtccagtttttttgctttaggaatatgtatttgcaaaatgaagttgtactctaacacaattttagctaggtttttgcacttcatgttacaatatttttctgtcaaaacacctataaccctatatttaatggttctgtgatgatgtatatttacatattaaaacataatgagtgtatctcttcttgagaatttattttgcttcgagttcgtcattattatataaaattatgccctgaacatccgcagtatggaatggactttttttttgctaatacatatgcaaaaaagcttacttttttaaatgtgaaatttctaaattcacatccaggatgactgagcagttcatatacttgttgattagtgtcaaaatgctgatcctcccgtaaatcccctgatcgtcgtaggtgtttgcatttcattagcagcaaaacaaattaacaaaatttttgctagccatatagttttaaaagagtatcttcttggtttttatcttgcatttctctaattagaaatgagaaatcattagttagtaaatatcattagttaactactactgtggaaggcagagttcatggtggaggctagtgagcctgttctgtcttcatgggctgtgtgtcagatgcctctctgagggcttcaccgcaggcagtgatgtggtaaggcagagccaaggccttagaagttctaaaacttcccagtataatttagtaacaaaagatttttttcctgaaactcaagaacagtgttgtagatagagagtgggtcacatggagtccccaggtaacgtgtgaagctatctctatcagtcagctaaggctgctgtaacaaaatgccacagactgcatggactatgcatggaaatttattttctggctgggtgtcgtggctcaggcctgtaatcccagcagtttgggagaccgaggcaggcagatcacttgaggttaggagtttaagaccaacctgatcaacatggccaaatcccgtctccactaaaaatacaaaaattagctgggcatggtggtttgtgcctgtagtcccagctcctcatgagactgaggcaggagaatcgcttgaacccaggaggcagaggttgcagtgagccaagatcacaccactgcactccagcctggactctgtctcaaaaaaggaaagaaagaaagaaagaaaataatttatttttattttctaacatttctggagactggaagtccaagatcaagagtctgcagcagagtttgtttcttctgaggcctctctccttggcttgcagatggccaccttatcactgtatcctcacatggacccatcctaagagcttaattttaaattaatcaccaccaaatacagtcaccttttgaggcactagagtttacggcctcgacatatgaatggggggacacaattcagttcataataggagcagaaacacacgcactaatcaaacataaaataatttaaaacagtctagaggtcttaaattgtgcctctctctgagtgtagacagtgcatggagactgccctccccgctgctaccccacatcctgagcgttctgtcctcgtttccactgttctgctccattgtgtgggaggagctggagaagagactctgtttccaaggaagtgtggcctatgctgctctgcacctgggccttgcgacagccgctgcctccaaccaccacaagtctactgctgttcccactaataagtaccatggaaacccagtgcatgccaggggctgtggagaggtgggtgaacatcaaatcaccagtgacactggcttttcaaacgtcacatcataaaaatagagccacctgagtaagagcgggccacagcggcatcctgtagctccctgttttttggcatctacttcccttgggctcacagtcttctccatgaccagcaggaagactcagcactgcaactatctgcacgggttggtcgggctacacatgcctttccctagcatattgctaacactcaaaccagaaactgattaatttgatttgggttaaaaaatctgaccccatgaaggctttgctgatcattgacaaatctatccttcaagcattacagttttaagatagagggatgctgccttagtctctgccttttttgccattaaaaaaccttgaaaatgttatatcatagatagatacattctaataacagccccaaaactgatagatctgcatactcagattattgatcccaatactctcagcagttttaagccccgcccctgcccaaagggaacccctaccaatttaattcaggaggcttttggatttcatttaatgtggatgttatcttgttttgtttctcactatctgatgctattaccatcttaattaggttgaaaatcagcaattagaatcagaatgcctgtaatagttgtttttcttttgatcatagttatactcttaatgatgagattatgatgtgtgtgtgtccacgtgtgcatgtccatgcgtgggagtgtgtgttgtaggaagagcagtggatgttaagtcaggaagataagcttgaatgtgagttttgcttcttctaagatacctgaacttgctggagtgagcctccaggagccccagggtcctcattcgcaaaaagtgagggaatggctgttccttagattaggctgctttgaaatccatagatatcaaaccatcttataaaccaaggtgctgcacagattaataactgacacattggaagccgaggagtgtttagatatgtgggaactgggggcacattgaaatcattactagagggtaaatgttatttattctatgagctaattgcgggatttaaatttgggagctaaattttatcttaaatgttaaatattgtacgtaggaactggtctttggggggacaaattcaagctagtaaggactgttagagaggagaatgatgctgtgaaaatttaaatcccacaatgttgtttactagaaagatatccatttccaggcatctggacatgaatttctcagcctttgagaaaagccaacttaaccagcatgccctttcgatatgattgctccggaagcgtgggatgctcagtttgaaactgagttgtatgtcaatctctgatatctcaatttctgacacactgaacacaagcaggagaagagatgtacctctaaagagtgaagaactctctctctcactttctcgccatcctatctcgtgccatttctctttaggttgattgtttttaagaactggtgctcagtgcttagtaaagaatacttttctgaagcatttctcccaaagtgtatcttgatagattctgcaaactattaagtaagatttcatatgctgagatggtgtaaggtgatttatatttttggagaaagctaaaattcatcttactgacttttcaatctctccttattttcctcttttccatatagatatttagaaaagcaaagtatattagtagatttaatctccagaggatgagaatctagggctttttttttttttggttttctttaaagattgtatgataaaaaatgtttattatggcttaagggggaatgaaggtattcagataagttaattacatgaacaagcatgcctgattcctcttccacacagcctgtctcaagatccttcattcgtcaactatttcttaagcacctactacttgccagatgctgttttaggcacccagctccagagctgcaataatgatggagattttctcaaacccaacacccctggagcttacattcccgtggagaagttagataggaacaggtatacaagtaagataatttcagctattgagacatgctgaacagggttaggataaaaagtttgaatttatataggtgttcgggaggccacagctgaggtcatggtagttgaaatgagttcaaattagaagaagccagaaacggcaatacctgaaacagaagggtatcagaaagagaaaaatggaagttcaaggccctcgagggactgaaaaatggccagcgtgcctgagcataataaacatgctaaggagtggtaggaagtgaaatgggagaggtagaaaaggtcaggcacataaggaacttggacttgattttgttgtaatggaaaaccacagggacctaggtaggggaaggtgttgatatgctgtatgtttttaaaaagccactctggatgctgtgtggaactgcactcttgaaagctacacctggagacaagaagctaagtgagaaggccactgtgagatcctggcagcttagactagagagtggagacatagtaggaatgtgtcctggaaggtgggaaagaggacttagattgaaggaaaaacaggaatgaataaatcaagactccctcctaggttcccgtcctcaataagaggagggatgataccattattaactgggatctggagggtagagcaatgagttggattgggtggggggatggggcgagggataaaagagtggttttaagcatctggcattctccatgcttgttaggtgtgcaagtgaaccttttgagaaggtaattggatattgtgtggaagggagggaatagacatctattgaaagaacaaatgatatttaaaagggtggtggtgcagggaagtggatgtggagacccacatcagcactgaaaaccagtgatgggattatgcacaccatatagactgggaagtgacagggaaattcttgtagatgtagtgcagtggggatgttactatctctagtttttaatccagcgtgcatttttaatcacatgggggagatacaaaaataatatacccatgccccaggccccactgccccactgtagaccaatcagtctcttttttagagggaagggtaatggcaggcctcagtagtttttataaagttccccaggttattctaacatgtggccagggttgtgggcagctggattagaagaaaggaagggatggcctgctaatcctgttaggagggtggcccctggaactaggaagtggaagtacctcagtgcaacctcacactcattctttggagaagaaaaaggaagaaagtgagggggaagccaagtgtttgagcagtggagatgggaatcacaagacccctgccagcaagagcctttattcattcagcatggttgtcacatcaggggaagagcacattctggcccctaaagacgacaatggttgaagaaaaggtaaaggacaacttcccagatagctcctcagtgacagccacgtgctggaaattcttcagcctgaggtgaggctgtccctgcaactgtcagactcagatccctctcatctccagggttggctgaatctactatctgggcaaaattatgtgcagacaatctaaatgtttactctctatgacagtttgtcagtaatttttagtatgggacccagggttattaaaggcagggtgacatgggctgcagtatgacttgatgtaaaatatttcagcatgcattcttatctttgaccattaattccacttttaggcctttgtccaaaataaataaataatacgtgtttgaagagtttttttttttttgtacaagggagaaatacttgaaatatttgaaaagatttgctgacatgcattttctactgtgtaggcattgtaaatcatttctttaaaatcagagcatgagaaaacatataccatgtaaggtgaacttggaaaaacaggtttaaagttatgtataactgtggttatacaggaagatttcagaaaacaaacattggtaataaatacaccaaattgttaaaagcagctcttgctgagtgattggattatggtcaactttaattttcttaaatttttcatttacattttattttatctcattttaaatttccttaggttttcaggcagctcagatatcccacagttttagtaagaacacatattgaaatagtattttaaaagagattgattaataaggtcttaattttagatgagtttagttatgcatttttaaaactccgattctccaaatttggaataatggtttctgcctctcagagctgttacaagaattaaatgagataaccagtggggaaccatgctgtgcaatccctgatccatgttacaatttctttagtatttttgcactattgcctctgcttctaccaaggaactttatcccatggaagtgctacctttcacctaacattttgttagtttacgtgaaatagtcaacagatatgaagatagtttcattatttatgctgattgaaatgctgatcattggtgcaaaccggcatcccagcaggatgagctgtgattgggtgaaacatccatcatgattccatttctctttgccagtgactggcttggggttgggcattgtcctcacccaggagaggtaagggggaatgtgctggtggcagcagggaaggatttcatgtcctaattaaaagagagaaagctcctggagagtgtgtgtgttctgacctgtacttactctctttcaatgggaccttggtgcctggagctactgaagctgccctgggaccatgaagctacaggcctgaagatgaagggcctggcccctgttgactccgtggagctgccaaagcaactggaggctgtccacctttaggcatcttgttgagtaaacactcgggcgaagtctgtgggcctctgatagttgaatgtttgtcatacacagtcagcagcagtgcagttgacactacctgtggaagttgacatctggttcccaaaaacaaatagaaaggttggtgggaggagaatctgctgtgtgtttacatattttaaacatgtatggcaccctaggtttttctttctttttttttttttctttttattttgatggaattttgctcttgtcgcccaggctagaatctccgcctcccgtgtccaaatgattctccgcctcagcctcccaagtagctgggattgcaggcgcctgccaccatgcctggctaatttttttgtatttttagtagagatggggtttcaccatgttgtccaggctggtctccaacacctgacctcaggtgatccacccgccttggcctcccaaagtgtgggattacaggcatgagccaatgcgcctggccggtttttaacgcacacttcttataagtgcctagcgggattacaggcatgagccaatgcgcctggccggtttttaacgcacacttcttataagtgcctagctaacttggcaaaataatttcatttggtattcatacaaatttactactttaaattactccagaaattaagccaaatgaattttggagagtctgagaatcttaaacaaatacgttgtgaattacaagtttgcagaactccatatccagtgtcatgtcctgagatttagattcgcatatcagcaaggctactgctaatgacgctggggttttcaggtggacactgattgccacagtcactgaaaatttcatttagctgaattcctggaaaatgcttaagatatttacattttgataatatagaaatcaagagttaagctaatctaaaatttgtttgtatgttttataggtatgatttacccaattttgctgtcctgagaggaaatattacaaatgatagctaggtttcttagataattggagaaagtgctgtgtaaacatcaaaatattcagggcatttgttattatttatgcagaaatatagccaaaatactggcatattttcagttagcaatataatagtaataatagaaagtaaaacattttaaaagaggtttttctggaaattttttcctcaggatcacaaaaagtttttatttttcataagtatttcagtgatataatgagcacaagatacgttttgatgaaaagtaatgtttacatgaaaaaggaaatgcttattgatatttaaagacaattccctactctctctccttttccacatggtgaagtcgggagctccagatagaaatccaaagagagagaaagacaggggcagggaaggtacagtgtggaataatgtggactgtctcacatgacacttaagaggtcatgtgatgctagtgactttgctgatgtgtcaaggctagggctgagaggctgtgtccagcactgtcatctccactacctgaggcagaagcagaactgcagccggggcctccctgtgcttccagcactgaaagtaaagtgaacaagggttatgtggtcaacatgtgtgatttcttatagggaattttggttttgtattactaaaatacatagggtctggtgcaatgactcatacctataattccagtgcttttgggaggaaaaggcaggaggatgtcttgagtccaggagtttgaaactagcctaggcaacatagcgagatgccgtctctacaaaaatgaaaaaaatttgtctgagcgtggtggcatgctcctatagtccctattacttaggaggctgaggcgggaggattgcttgagcctaggagtttgaggctacagtgataccgattgcatcactgcattccagcctaggcaacagagcaagactccatctctaaaaaagaaaagtaaaataaaatacatagcttatgtatctgaaaaccttcaccattggatagtaaaaattcaatttattataagatcttaaacagaatccttgagaaacttaaatatagttaactctaaggttatgaggagagattgtgggacttggaggaaaggttagtctgtaccccaaatcacatgatttttatagaaagaacacaaaggatggttacctgtgggcacattctggaccacttacatgtttacttaacaacagttccagcagttctctagtgtgtgtatgtgtgtgcgtgtgagtgtgttcactttataagcaggtaacttcctgcctatataaggtaactttcacggatttcagacagtgtaattgtagttactgggtagaagaggtctttcatgaaatttgcaaggggatctctgcgtattttgtgagtttcctcattgttctctctataattaacctcacagggcagaggatagtttcttttcttatagatccatatcacaggcatgattctccagctgaattcctgagctcaagatttcctttctaaataaaggaaagggaaagaggattttctcgaggtaatggacaagagttgggaaaagtggttgcagatatgcttgatgctaaggaagccctggtgtatggactgttatgtgttccctcatcccctaaatttctgtgttaaaatcctaaccccatatgctggtattaggaggcaggggcctttgggatgtaattaggtcatgagggtggagccttcctgatgaaattgatgtccttagaagaagagagaggagagggcttgctttttcctttctctgctcttgggcatttgaggatacgggagcaggggatgtctgtaagccaggaaggtggccctcatgaaatagacctgccagggcctcgatcttggacttccctgcctatagaataatgagaaataaatgtgtgttgtttcagccgcctagttcatggtatatttgttatagcatcctgcactaagacacctggcttgcagagtgaggtgccttataagaaggtaggatacgtggtttacacacaggtagccacagggtgcagggtgcatctgtaagtcaagtggttacaacctctgcctctctaggattaaaatctttggcactggagcgaattttatgatccatcttcctgaaggaaaccaataaaaataatagtaaaattgacaactaactacactgtattgagcatttcctaagtacttgtcatgggttgtaaacaacatctcactcagttctcagtacagtttgatgggacaggtactattatctccatttcactgaaaaaaaaggaaacctgaagtgaacgataattaagtttcgggcccaagttctcccttcttatgatatgatggttaggttttgtaaccagggttatgatttaaaaatctctgttccatttccccccatgaactcttcacttatactctaaaatatctcaaaagatgcttgtactacatgtaatatggcatgcgaggaaatggattttttaaaaaattttttagagactcagaggccgggtgcttcaggctcatttttaccacctgacccgcgggtacacagcatgtaattgtatctcaaaatcatttccagatatgttggaaagagcaataggaccagctgtgtttctcataaaagattaggcacaagtcatgtatgaggtttttctctactctgacttgtgaaagtccaagcagtgggttaacatgataaaggaaaacaaaattaaataagctggtgtaagcataacacaactgacttccagaagggagataaatgttgcatagagacatcatatccagccaaattgttgcctctggtatttccatttggctaatagtgcttaatattggttgaaaaataaaagtatgccgagaactcgtatatcatatggtcagcattgcatggtttcgaacactccagtgaacccatctggagagtttcagccaccagggcctgacagcctcattagctgcctccacaaggccttgcccaagcaacagtacaaattgctgttgtttcagggcgatggtgcagagttaaagaaaacaaacatgttcaactgttttgtgttttccatgttaaaacctaaagatggaaacctaattattcagagattccagcagaacactgagccctcactctaaatttttacagcagttatcaatgtgcttaagaaatgtgaatcaggaaagtgagtcacatgctcaacatggtaaacatgtatatatccaccttcaagacttcagagtgtgtatatatatatatatatatatattttttttttttgtttgtttgtttgttttggagacgaagtttcactcttgtcacccaggctggagtgcaatgatgcgatctcagctccctgcaacctctgctgcctgggttcaagcaattctgctgtctcagcctccctagtagctgggattacaggcatgcaacaccatgcctggctaatttttgtatttttagtagaggtgggatttcaccatgttggctaggttggttttgaactcctgacctcaagtcatctgcccgcctcagcctcccaaactgctgggattataggtgtgagccaccatgcctggcccagagtatatcttaataaattattatcacaaatttgcatcctcatggaatctgagtttggaggaaatctgatgagctcccagtttaattatcatccctggtataaatctcttgactgttcccagacagaaagggttgcttagtctctgcttggactccttcaatgctaagatctccttagactttaccttttgattccagatggcgctaatcattgaattactgtctcattagtcaaattccaccttctacgcctgttcttaattctaccatctggggccaaaataaggagcctgtccatgttccagcagacttttaccaggtgaggacttcagtcgtattttcactgggccttttcatttctcagataaatcagcaatcttttgtttctatggcagggtttcatgttccctgcagcattctggttgttctccttaggagtacagttgtttatcccaaactcccaaaccgcctcctttgtaaagaactgtgatcattggcaagtaatctcctctcagcccatgtttcctcttctgtaaaatcaggatatcatggtacctgcctcagagggttgctgtgagaatgaaaagagatgcagtgagttgaaacacagtacccagcaagcagtaagtgctgaaaaaaataagagcttctcttaccaaagtatctcttaattcttaatcccagtactaaataccaggcgtccagaacaggaccatcctgaccctttcatgcagtctcctcctcctcccggcttcatataattcatgaatttagcatcatgctctgctatctaactgtatcaaaaaaggaaagggctttcatttggctggatccatggttcatgagtccacatttgccttaagtgatcactgtttccaatttttatacacttacaaaccactcttcgtttttttccttagttcatggattctgtcatcttccccttgtggaaaatcacaaccttcttcatgtcttcagagttttttggcagcttttcccactctccaggtttcccattcctctaggtttgtagaacgtgttctaacctgcaaagcctctggctacctggatatgttattttttggaccacagacctgagttacagggttgagttgggaagttctctattaccgggcatttttttctggccttcccacagaccatagaatcagagaggagttgaaaaacaatattttcttttatatcttttagtgtcgtttatatagccaaagcaggagacagaaaaacacccttgggcaattcaatagaacataacttgagagacctggacctctgattagtcttgtacttttgtcataatttttggttccttctggaagttaaggccgtttcctactctgtttttacaggccattactggcaatcagcatgcagtttaactgtgcccagtttttgtgttttcttcatgtcctttgaaaatcagccctcacactatggctagattgaatgcattctgtgcatgcattctattctgctctaccctggtattgtttgtgttttttgcataattggaatttgccttcttaagaggtttccaaatctcttgggccatctttattagaggaagcagcactgtacaaatgtaaatagactttaaatatttctttagccctacagtttataatgttgtttggtcatgtttctttttaaagacttcgggattagagtaatatgtcttaggggcaaggagactcttctaggtattctttgtcttagtgactttattaaaagggtaccttgttgtaatgtacttacctcacaaagtttttgtaagaatttaatggctgttgcaattaacacgtaactgggtgttacagaacacccagagtagtgccaggcatgtgttcatggagtgttggctactactgctgttcttatcatcatcatcatcatcatcatcatgttcattggaaacgaaaatttcagtttcaaagaaaaaaaacagaccctgctcttcaatacagtatgcagccaaatgttcgtttcccagatgctctcattttgtcctgaatcacaattgttatttcaatgaagagctcctccttcattcaattgctattgttgtgaatactattttaaatagagtgcttggagaaggcctttctaaggatgtagcatttgagaaatttctgagaaagccaagaaactatctgcagggcatgtaggtgagacggggaagagcatgggcagtgaccatgccatgggagtatgtttgtcctgtgcagaaacagcatggcgtccaatgtgacatagagtggagcgaagtgggctggcaagaatatgttgccacgtgaggtctgagaagtagccagggtggggttacaataagaactttgaatttattctgtgagagatgggaaaaaattagaaactgctgagcaggagtgtggttggcttgtgtagaaaatagacgagatggaggcaggagtggaagcaaggagaacgtttgcaaagttatcacagtggtcttggtgaaagatgctattagcatggcctggagtgggagcaaaggagcgggtgtgaggagttctgatttcaaagatattttgaagatagtgtagagcagtgagggtctagaggattagtcagagagagaaatcaagtagaactggagagttctttgtttatttgtttacctgtgcaaaccagctacttttggagagagaagtactagagtaggagaggtttggagtggggaagtcagtcctttgttaaatttgagatgcctgttagacttccagtaatatatgtgatcttaggaaaaatagcaccatttgaagacttttctagcttccatttgttacctgtgtcacacctgatctgtttctaggaggatgtcaattatttaggagaagaaaaccaccaactaaaaatttaaacaaaacaagtaatagacttggtttcaaaatcatgatctgcttcttttaagagttataggggacctgcatccactgcctaaatgaaaacacagtcccttccaaatatacatttgattaattagaagctcaaagctctgtttttactgctttaagagaaaaaaattatcaccacattatagtggcaatttctctgatggaaactgaaatagtggatgatgatgatgatgatggaaatttcagagtagcacacaccttattgagtgattacattttaaaatatatgtgtattcatttattcatataatcgtttttaatgagagcactctcttaattacattatgacactgacttggtaaaagagaaaaaagatctctactgaaactatccctaaaggagctgatgttatggaaactgagatttttaatatttttagctgagaatatttatattaactggataactgcgaagatcacctccttttgactataaatttggagctgggttgtacagaattatatttagctctgggaaactaatcttaacagtgcatgttttaaaatagtaaggcttctcagtttgtacaccaaaattacagactccttgatacccttcttccaaaattttcagaagttgggacttagaaaagtttcattttgatattagagatggtatcttacagcactctgatttgaaagctagtacaatgaggtgactctcaaagaacaaaaggaatcaatatgcctaattgtgtttattgctactttttcatctttgctagatgctttagaagacaaaggccctctttaatttgttgatgcttagatgcatgatgtaatcttcaacagactgatctgcgctctcataattccaaagtttcttcccgattgcttgataaaaatgcaaccttaggtatgttttggaagacctccaagttatttcaatgttatgcaggtatatagaattaatattattgatacacatcttagcagtagaaacattttcaattatgattagaaaacatctttcttaaatgtcatcatttgatatcaccagtgatatcatagtgaatatttaggcaattttatccctgggcctagtccacacacatttttctagtaaagttgactaagacattcatgagccaatacaatgagcctatgattggtaacagggtggggaatgtctatacctttcatatattgcatcccaatattctatagtaggtattgaaacatgccgtacccacttctgtgccaaggagttttgtagaggtgatgagtcaggaaatccaagttctgatctgattctgttagaagctgattcactggctttgtacaagttatttcaagtttccagagattggtttccccagccatatgattacggggttcaaatgattgaactttgatgtttcatgttaaaccacctttgttcctctctatgtgggaatgggaaaaagtggacacctcagtctcgaaatagaagtttggggatgaaaaaggagagaaactaagtttgtaaccacagaagtgggggtcagacagcatggtttgagcactttcatgaatgcatctggtgtcagctgctggcctctaaaactaagtcctagtgttcacctgagaaggagttatctgtgttctctttcccatactgttttaccagtaaagatgatgatgagagaggtggtggtgatggtgttgagagtgatggggttggtggaggtgatgggagttgtactagttttctaggactgttacaataaagtagcacaaaccaggtggcttaaaacaatagaagtgtattctctcataggacctgaggctacatgtttgaaatcaaggtgttgggatgtacctctccctctgaaggctctagggaataattctttcttgcttcttttagattctagtggttgctggcaatccttggcattccttggcttgtagatttatccctccaatctccacctccttcttcacatagtcttctcatttgtgcatctatgtttctatgttcaaatttctttcttttttaaaacacactggccattttgggtttaaggcccattctactccagtctgaccttattttcattgcatctgcaaaggccccattttcaaataagatcacattcacaggttctgggtggccatgaattcttggggggatgttgttcaacccagaacatgagtggtggtaatggagatgggatggtggtattaacgggtatggtagtctgtggtgagggtgttggtgatattgatggtagtgatgatgtgggggtatccaagggttccatctcacatgatatgtactcagttgtagcaaaaatacttattgtacattgatccaaaattggctgcaaacctgtgactggttcttggcacatgcatcactacagagtaacaacaacataaaaggcctattgatgatgtcttaagggctctttgagaagtaaggggaggcagaaagcagttgtatcctcatgacaccgaggcagatgtttccgtctttaggaaggaagacagcatttctctgtacaaagcactttcagtttttacagagcaataatatttaaatgtaagacattcaacttgtaatcaaaatgggaaatagataataagacctttaaaggaaatatgcgtgatgcttttgtagtccatgttcaggatcatcttcctcttatttcttataagaaattttacaaggtctgtcctcatgtcattcagtgggcctgaaattgtatctgtttttccccttgctctaaaagttatattgaaggaatgattttgcactattgcacactaaaaaagcccctactcagaaattttaaaaacatctaaactcatattcagatatagtggagtaaatgaataattgtttcagccagagggttttctcaattagcattttaaggtcaaaatttaccctagaatcctgtagaatcagtggctgtgagtcacctactctttcctttcacataatctatttcttgctgtccacctactaggcaccaagtgaaataataccctttttatgtttctcagctctagcttgcagagaagagtaaagagaaataactactcagggcaggaagatatttgcaagaaggtagcaaacccccaaatccctttgacggtgggaacatcaaactgagcccttgaagactagagttctgggtactcaataatgttcaaagtaaaaatacttcagcaaattggatcaacactaatttataaactaaattaaacaacatgcattaaatgtaatctatgggaagccacaaaatattttgctttgcatattttttaaccttagtgataacaattcttagaccaaaatagaaatctccagtgttgcctgtttgtcaaggaagccttcttcattatatttcaggtggaactaaggagcacaattattttgataaacttcttttttactttttcattttctagagatagtgtcttgatctcttatgcaggctggagtgcagtggcgcgatcatagctcactgtatcctcaaactcctgggctcaagtgacccttccacctatgtctgtctcctgagtagctgggactacagatgcatgccaccatgcccagctaatttttattttattttattttatagagaaagaatcttgcaatgttgcccaggcagatcttgaactcctagcctcaatcatcctcctacctcagcctcccaaagctttgtgattgcaggtatgagccactgtgccaggcctctttcttacaactttagaatttttccataagatttctcctgtaggtaaagccaggttattcagtggaacttatccttggaatatatgtaaatttgtgccagcagatttttttgtcttttttatttggttgccaatgttatgatagccatttctttctcatcagtttggttcatgctgaatgccttgtgttggtgaaccttactgctatgtctttattagcaaagcctcagaggtatttcggcatttggccaaatatttgcaaaatgtgccagttagtcaagtggagaattcatttatttttgggcaaataatgggtttttaaaatgggattttcaggtaaagtgctactacatagtgaaagcctgctatggtgcaaagcctgctatggtgcaaagcctaggagatcaccaagaaccagcccttcccttccctccatttcctgggaatcacagtgtcccaggaagctctcatctttcattagctattgactgagagagatttttgcagctgcaatggaaatgccctctcgacagtgtcacttgcttttggtttaagcccgaaaaaggtacagcaggtcaagtcccatttgctgctgtttgactggagtgtgggcttgtgtgtgtcttcaccctctagcacagacttgttttttttttttttttttttttttttgatgagactacaaggaagaacacttttccttcactgcatgtattttactgttattattgttgaaaccattccttccacctccaacctttccccgttaccacacacacacacacacaccccaaacccgaaaccaaccacaacagcaaaaaacccaaattatataaagggcaaaggtaatgcagttaatctctgaattactttggattcctaacaaagaaagaacctaaacaagaacagcatctgtttaaagtaaaagaatgttttcttacaaaaaatattgttattgcttattttagaattgccattatgcttctgaaacgtactatgagagtaataaatgttaattaccagagattagaaagtgcaggcaaggagaaagataaaaaaagtctccaaaattatactcaccagaaaaaaacaatcaccgttagaaatctcagggtaatgctttccagatacttctttttctttttccttacttttcacatttttttcttttactttttgtattttattttatgctttggatggggatgtaggtatatgtgagtgtatttgagtgaacacaagtatgttttttcatataggtcatgatgatgatgatgatgattacaggcagtctttctctgttgctcagactggagttcaggggtgcagtcatagctcaccgtagcctgaaactgctgggctgaagtgatcctcctgcctcagcctcctgagtagctgggaccacaggtgtgtaacaccaaacctggtagatttttaaattttttgtagagatgaggtctccttatgtttcccaggctggtctcaaactcctgggttcaagggattctcttgccgtggcttcccaaagtactgggattacaggcatgagccaccatgcccagcctatacagaatattattttgtatcgattattctaaaacggcttaattctttcatgttctggtgggggagcaggtagcagagtgttataagagagaatatcccagaataagtgaccagagaaatcctttttggtgaatgacatttatggtgagatattaaggttgagatctgttgtcatgctaagaatggggagacgaactttgtaggtagcagggatcccagttgacaaggcctttgggtggaaggagagcttggctcactcatgcatctgaaagaaccagggggctgaagcacacaggaaactggagagacaagatagaaggtgggcagggatcagatcatccaggcatcttcaaggccatgcttgtttaacttaatgtattgtgactgtctttctgtggtcaacattctaaaagcggtagattttggtgttaagagcctggccactggagtcaaataaatccattgtgtaaacttagacaagctaattaatgtcccctagttttaatttccaaatctttaaagggagatgattgtaggcaatgtctgaagggaccattggggaaaaaaagtcagattatacgtataaaacaatgaagaggctggcaccacttttaatcagttttatggttgaatttattcaacactcattgatggagtaaccaagggcttggtcaagaaaggttatttagcagaagctataatggagcttcaaagagcagagcagtgaaacttgtacttctcctcctcaccacctttggaataatgagcccaggtgctccattgaccagcgtcctcatgcagagccaagtgctattactgtctttttaagttcttaagggcagaaccgtggcttttcttacttgttcttacccagcaccatactctcactcaggacttttttcttttttttttttctttgagacagagtctcactctgctttccaggctggagtgcagtggtgtgttctcggctcactgcaacctctgcctcccgggttcaagtgattctcctgcctcagcctcccaagtagctgggattacaagcacgcaccatcaggcccagctaatttttgtatttttggtagaggtggggtttcaccatgttggccaggctggtctcgaactcgtggcctcaggtgatctgcccacctcagcctcccaaagtgctgggattacaggcatgagccaccgctcccagccagcacttttgaagtagagatggttggtgaatccacgtggaatgtctgataaataacgaaagccaccgtgaatcacagccttttctttccagaagggagatcacacttttactccagtgcagactttatgtatatagaaaaattgaaacatactttaaaagatgtttaaaatatatttcagcttttaaaaaggaggttgaaaatctgtaaaattgtatgattccattaaaaacatggcatacatccagagctcttgtggcacttgtatcaagcggtacagctatgcacactctctaaggcgggcagctgtaagggctgtcctctgcttctggcatgccacattggctaaatatatcgaccatcacctctgcatgcacagcagtaattattgacgtattcctgatggttttctctggctgtgaaattatgggaaattaaatatagtttatatttttacaatgaacacgtattacctttataataaaaaataaaattaaaaatcacttaaaatttcttcaattcttttcacactcctcttcatgtaacttcatatttgtatccagcactcacaactccaaggaccatgcccacgtattcttttagaattttaaaaataaattccagtaggtctttcaaatactgaaatctcagcactgaagtagattgcagtggggcatctgatgggtacatttcaaaaatgctcaatttgctcttaggagacttgaattggccaggcgcagtggctcacacctataatcccagtactttgggaggccgaggcagcaggattggttgagactgggagttcgagaccagcctgggcaacattgcgagaccctgtttctgaaaacaaacaaacaaacaaacaaacaaaaatttaaaaatcagctgggcatgggggtgtgtgcctgtagttctagctactcaggaggctgaagcaggaggattgcttaaactcaggagttcaaggatgcagtgaactgtgatcatgtcactgtactccagtctggacaacagagtgatagcctgtctttaaaaacagaaagcaaaaaaaaaaaaaaaaaaaagaaagacatgaattgtatgattccatttttgctttggtcatttactgggtgtaaactcttgggttttccttatctgtaaaacagagaaaacagggcctcctttatgtgagttatagattatctgatgattcaaataagatatgaaagtacttttaaactaacgacacaaatactagctgctatttatttaagttatgattcattaattagtgtatcctgtgaaggctccagttttgtttttatcaaagatcacgtggagaaatggcttgcattgggataatttataacttattaaaagtttgcttctcattaagggactattctctttggaaattaggtattaaatatatggtttttgtggcaacactgggatgtgtgctgtactgctcctccctaaaaaaagatcttttttatattttaagcattaatcagacttgaggctatttgctttcccatcctcagaccctcaagtgcttgttgtaggttggattgtgcttgatattcagaattgagtataaaagcatgtgctctgctcgtggttggtcagctgccttggagaggctagattcttcatcatggcacaattacagaaaaatacagggttttcctgagtggccaaaaaggagatgaggtgggtgttgggcaattaggaccttatttctttaagtttctcctgaaattgttaaagtcagctcacacttctttagttttttttttttttgccaaaacacaaggcatcaaataatgttggaaaatatccttggtgctcagctacagaagtttcttgaatccacaagtaataaggagctatttggcatcattaaatacggagtgtgggtttatcactccagtaaatgaatcaggagagaatactgagttagcttcctgctgagatgtggaggacacctggagtttatctagcacctctctgtgagatccctgagagcctcctcgatgagaatgcaggtttattccttctacctgctgaggagacagaaaattagcatgataatggtgataattgttctgtcctctggacagcctggacatcagggaagctttgaggtttcagtaaatgcttacttattcctctgctcttggtacaggcccgtctcttggtcaagatgagagatacatagaaatataatataagccccatctgtaaccatatgaaaaaagtaaaaagaaatagacaaattaattttaatgatctcacttaacatatctaaattattatcatttcaacatgtaatcaacataaaaattaatgaaatattttaaattctttttttagttgtatgctacatattcaaactctggtgcgtactttttacttagagcatgtctcagttcggactagccatgtttcaaaggccttttcaccacttatggctagtggggaccatgttggacagtgcaggtttattccttaccaacctggcccatagtagaaagtgctgtttccatgagacagcctttactcctcagtaagtatttactgggcatctaatatttgcagtttactacattttggttatataaccatataacttgaatttaatgaatgaatcaagaaacataataataaatagtataagtaaagtttctggatatctgtttgctaactgtatgatacagaagcagctgagtatgagttttcatgaatttgcagtgtagctttgggatcatccaagttacaattataggctaggtgacataaaagacattggcattggggggctttgtgtagcatcaggaagagctagacagtcatctcctaaaagcaggtgaaactgaaatagaataacgaacccaagggtctgctgtcgaagagatgtagtgtactatttaggtgtcagagactgaaaaaatacatagtgaaggtggctatgagcacaaactctagtagaagggcaggcattgctaattacaggccttgatttgtatttgaggcacatcttttcttgggcatctcctgagttccatgaggacagccaatgagtagtgcctaataattgtactgcctttctgccaggtgccaactcatgttcgccaatgtttgaatacattttcaaacttaatttttacaaaaaatgtcatgaaataggcactattattatctccattaattaatgatgaaattgtaaatacactgatgttaagaagtgggactaggaccacatgggtattaagtagagggaccaaaactttggcccagttttatccaaccccaaaacatataattttagcttataattctcttcaaattagacaataccatggctcaaaatataaataactagtcagagattaaaacatgtatctgtatgaatggagaagcttgattgcatgtctgattttaaccagcttagattaaaattaaattattaagtgtacttaaattaacttattcaagaaccaattcagaggccactttctataaagagccccacttcaagtcccttatttggaatgcatctctccttcctcggctctccccaaacaatttacacatctcttggtgcataataaccttctcttttgattatagttatacatgagcatgttttatctgccttttctctccagccactacgtgtgtcttgtacacaaaatagctcctcaaaatatgtttcaaatagatgaactaaatgactagatggatggaaagatgaacaaatgaataaataaatgaataaaactattcctgtccccttcaaaataagagaagtgtttgtataaattaccttgagagtaggtaaaaaccctttgcaaaaaaccccaggggtaaaaccctttgactatggcaataatatgcaacataactattgtaagaggagggcagttttaaaaattcaaatagtcatgtacttgaaatattaactattcaactatgcgtgtactggtttatcatccagcacatagatacagtttgtctttcacttcacaaagctagtttcatgcattttagaaaacgtgtttttccctgacccccctccaagctgtacttgacagggacaaaactgagagcattgggcactgcaggaatcattgtgagctttcaggaggggaaagtcatttctatgactagtacttttcaggagacatgggtgtggttttctcttttcgcatgttttagacaaaagtggcggactgatgagtttaatacaatggaataccatggcttgtgcatgagggagtaactttttacaggaatgtttattatctttgtcatccgaatccatatgccatgctcagaaaatacaatggatctgtgtcccgagtggaacagaaatagttttttcatgctgaaatgtgttttggtcaccatttgacatttttaagaagcagctctgtgaaatatttttgaaagtggatttatgtattcatattcattcatgtgctgttttttcatctatatattccccatcttattccagaaaggatttaagctggctcatgcatttgttgtatttggaatgtttctttataggtcaaggactagtttcccagtgaattgatttaaagaactgcagtcctctgactcaggcttgaattcacatatgatattggccatttgggatatctctctgttatatgggcagagtaaacacaagtataaatctgtgacaacattttggatttctcagatcaggtactccatcatctgctttttatcacgtacaaaagaaatacaaggccatttatttccctattaccctgtgttctggatttttctatttataaatgatattttatatgctctgtttagcagttagtaatgaagcataaagggaagccattttaattaatgccttatttgcatgtgtagcatgcacctcttttctttgatattattggaaaattattttaaattcagtcaaaagaagatgctttaggcaaatgaggacttgctgatagagagctgtattattttattttactaatgaaatgctgttaattttttctctgtattttacctgctgcaactggtttccttgactttgttcatactactaggatttttgcaaaaaacaaaaacaaacacaaaactggccataagcattgaatagaatcattgcaattttctgtcaaacgagttttgaaatacatctggtgtttaacaacacattgcttatttatttatttatttcaaatcattaactactattgcatcataacaaaacacacacacacacacacacatacatacacacacacacacacacagctttggttcaattatactatatagccctcctgtttccattgtgtttgggggaagtaaatgtaataaatatttttaaattcagtaacccatctgttgaattcttgttggaattaactgagagtttgtatggaaaaggcttagcctagaacttcatatgtatgggactaggggatagagcacttgaagggatggcatgggccccagggctgaaaagaagtgctgagttaggataggatataagaatatataagaataggatataagtgtggcagcgctgaaaatcagatggacattgcttcaaaaccgagcgtcgacacttgatctgatctgcctcttaaacctctttgaacgtctcctccctaatctgtgatggcagaatggtaatacttattttgaagttgtgtcaggattggtagcagcgtgcagagattacagcatgtattatgaactcataaataacattgcctggggtgttattttcattaacttcatcatcatcatcatcatcaaatataatccattgcttcaaagaatttatagtctagtaagggataaaaagattgtgtgtttgtattaaagatggggtggaattcttattaagtatcaatttcattgccaacatggacatggcaaatgacaggttcccccaaaaattattgagggaaactgagattagatattgaggagattttgggacaccaaaaccaaggcaaatgaagcactaaggcactcgacaaaatgagacacccatgaatgtccagaggtatcacctcagaagttggtctgaggggcaattacacaagcagagctgagcagaaacagtggcaatgaggggtgagtgcagccaaccaggaaacctgccgtcaattgtgttttattcttggcaaggccttatttgaagttttctttcttgattttgttcttccccgctactgctagccacatctgacagatacactaatatacgaaaaattaaataacaataaaaataactttataagacgtgcctcaaggcagaatgaatatcaagtaccagatgatgatggaaagaattctgctggagttcagtggacacagctgtcttatggcctgaggtgtaaggatgacactatgagaaagggagccttgacttcacttttgaagaagtgtgcagggagcacgctgggaaaaggagggctggaaaagagatgagatcttgctggatcaactgaagcacctgccacctgcttggcaggacaggaaatcttaaagtcaatgctcctcacccttagcaccctgcaaccaaaaagaaaattcgaagggttcctcactctatttgattggagttttgaagaatctgtggcatcgattcctggtgctttgctgcccaggcacccctaatcttagcccccaccactagggggcctccctctagtctccttccttctaagcattgatcacagcccactcaggtttaataagcatgactatccatgtctaaaaaaaaaatgatactttatgacatcaatttgttgtgaacttttcaagcttttcttcccaaatagcatatggatattcaatttggaaaattttgatataggtttaaacaaaatcaaattcaaataatctgtaattatgccaaccccagaaagctaatgcttttgcttatttttagatatacttccaaatttataatattatgaatagtagtacacgtcagtaagtacacatcttatttcacaaaacatgggctcacatttttctaattcatcttattcacttaatgttttgtgaacatttttccttgttatacatctacttcagtaacattttttacaatctgaacagaaattaattgtatagaacagaacaggattcctttgttcatttttatatatgtttcttctaatgtttttctcataacctaatatgaaagtgataggttgtggctacatgtttacttatattcataataacattttaggatatattttgccagaatgtattttatggtcaaatggtatttacattttaagtctttttggtatgtatttgcaaattgattttaaaatattgatattgatttatgtgaaatgggaatgtttgagagtgccccttcttggattcttagccaatactgaggcttgttataataaataaataaataaacaaataaaagccttttctcccactttgatgggagaaaaatgggattccatcatattgtcatgctaatctccactaattataattgctaattgtattatttatttgtatattcttgattgtgatttgtttgcttataatatttgcctaatcctggaggtatttatacttcattatcttattttagatagttcttaatatgtattaataatagtaactccatctctgaaagaaatgccaagtagttttgcttcacatagtctgtctgcttaatatctatctggatttttccccaagtcaaacctcttagtcttttcttttatggtttttaacttgttaagtaagactttcctcaattccaattattgaaatatctatctatctgtctacatttatgcctactatgtttatgattggattttttatttgtaagatttaatgtttcttaggttatttttgatgagaataaaggatccagtgtgtaattttgactgcttgtacatatttagtctgttttgttgttctggccattcctttttagtagcaagcactataacattcagggaaattttcaataactagtaatgcacatcttaaaaatgttctgactgttttcacttcttatgaaatttagacttatttgttggaactccaatacaatttctagtgaaactatgaatggaaatgacatttatgttaatttgagaagtaggttctttgcaatatcattttttatcctatagcaacatttgtctctctattcaagccttcttttctgtccttttgtggaaatgttatggttcccttcatataataaggtcttatacagtatattcccaagtgtttgcattttatccttgtctcatttcttgatttaaatggaatgccccaggtattatactatccagtttaaatgcccactattgctatttagacattttaaattaggaatcaatgttgaaatagttaacgactttttttgtcatctcatcatttgttaaaaaattttttgacttagttatattaggggttaaatttagaatcccttatattggcactaacttgatcgttttttaacaaatcctcctatgataatgttttgtattattacatgacttttttgaataacacaagtgcagttttgttacatagatattttgctcagtagtagcttttagtgtaaccatcacttgaatagtatacattgtaccacttaagtaatttctcattccttacaccctcacatccttccacccttccaagtttctaatgtctattattccacactctatgtgcatatgtacatattatttagctcctacttatagtgtgaacatgcagtatttgacttttcgtttctgagttatttcacttaagagaatggcctccagtttatctccattgctgcccaaaacaagacattgatttaataattaggatttcagatttacattcatataaaaatttgtctttagttttttcttttcctgtctttcggggggtcaggtgtgggcatcagttgatgctagattcttgatttgtaaagcattccatccttttcagtgctccagagagaaaatatttgaaagaatttacgtgtgagctgggtttggaatgattgttcttaaaaatatttttaaatgtcccaaatatttgctgacagatttatagaatgtctaggatttgcttaaaaagagcctcaggaacagcatggagggaggatctgtgggagtattataaaactctgagtatatgggctggttccttgtacattgttttgcttttatacatgtttgacatattcaaaaaagtttctaaaaatgaaatcacctgcaaaatgttttcagtggtggttacagattttctaatgcctctagtaattttggtaatttacatattattaggaaataatgagagtttaatattcttaaacatgtgtttttatcaagtctcctgtgtctaatatagtgcatttctgttttatctcttaatgagattagaatttcactttaaaatcatctttctaactcacaactctgatcagactacctacctgtgggcaactgctttacttactcaatcgaatttggaatgcggtggcgcgatctcggctcactgcaagctccgcctcccgggttcacgccattctcctgcctcagcctcccgagtagctgggactacaggcgcccgccaccgcgcccggctaattttttgtatttttagtagagacggggtttcatcgtgttagccagaatggtctcgatctcctgacctggtgatccgcccgcctcggcctcccaacgtgctgggattacaggcgtgagccaccgcgcccggccgaatttggaatttcttgtggggtaggcaacaaagccttcatgcgctgactccaggtgcctctcaaacctgagccccagctttgttttctcctccattttcccacactcctaagagacacttggaaattcttcctcctcagcctggggtgctgtcagctgtaaaacagtgtccatcttctccaagacccccggagaatgctgtttctcttaagccttccacaaattcccccttgttttatcttctgtcccttctctgaaccacataatgttttgttcagactgtggtatagccttaattgtactgtatgacgtttgcatgtttggaaacccaccttgttcttttttccacctactctgctagcagaggcctttgccctcaggtggcatggggagaatatttatagggtgagcatgtagaaacaggctgcgtatgtgccttaggccagcagtcttgttgtatgtctgcagcactgaaataggtgctcgttaaatgtttgtaggatgaatgctgagtgaatgcagtggacaggatacaggcaggtgattgggagcccagtaggactgaccccggtgggattagtagagagaagtagtgggagataacttggggtcatgttgtcattcacagtttgtggatgggagcaggtagggctggtggtgactataggaggcacagaacacgtacacagctcttgctcttcagaggttaccacaacaatgtgtatcttttccaactcataattagtagaaatgatgtttgtattaaggtaacagaaatatgctcctaaagtactttctcattatatccaaatcactttatcatcatttgttttactgtagttacaccacaatgtaaataaaagcatttagaaagacagttgtctgaacttcaaagctgtttacatagaggacatttgctagactgggcttttcctccatgtacccttgggtgagcttgtggtcttccccctaaagatcacaggctattttacaagttttcttgtgagctgttcagctttcttataagcatgagttacaccagggagttcatttgggtggacagagtccagaaatgtcctgtttcgactggtttgtttaagatggccatcaacatgtgaggtagggaatgtggactttctattatggggctttttaagactctagaccatcgttcgaattaatttcgttagccaaagttttaggccttttgtccagtgtgctcatttgcttcttggtttgctggtattattcagatcaaagaaggtcggtcactggaggaaaatggccagcatccataacaatgtgtacagttactgttgtttaattgagtggatttcctgtttgataattactattctgtagttcttgtgtgtgttttgaggatgagggaggagggacatatatgacatttgtatatttgcaggtgaaagagaaaaaaaaggcctaaagaaggggaataattaaatatgcttttagattgtcaagcttcctttcagtcctatgctctgtgtgtttgattcaaagctatttagagaaagtcatcatttgacccctgtgagatttcttccctgttgtgcttcaggtctcaaagagcttccccagataaattacaggccattaattgttaccaccaattatactggcagacatcaaaatgattttattaaagagctgtccaaagatgtaaaagcctatcttgacaagcatgcagccatgggcagtgtaatcactcgggaggcatgatatagagggaattgaggcacatgtggaacctttggtctagtctgactttcatcactttgtgcaacagaatatagaattgggaaactccatctaggaagcagaattctgatcacctgtatacagttccaaagcaagggtttgaattaatcatttctgcatttccaagacctaacatggcatgatgtggaagcaatagatatgtatggacttggatctaattctgaataattgattataattatcatactccagggaaatttgtaagggctgccacactgaggttgtgcttgcaaatatgaagtgcaaattggaattaattatcctggtcttttttagggaaatactttcttttgtcaatccagatgagtgatgaaaaagtaccttctggatttgaattagctggataattcttgactttgctcaagctttaaactggtaggagctttaatggctattaattagtgtgaaagctttttattttctgaaaaaactttttttttaaaaaaaaaagagaaatccatcttgattgacagatggattcctctgttttatgttttattgtttttgaagaaaggaactttgatttcctgccagggagctttcataaaaggaccttagcatgctgagccctgattaaacatcagggagacatgatgattcttttgtatagctctcccctcaaaggtgaagaggcctaaattacagtgactgtaagagaggtatctgctgaaggaccatgttcagctataggaaaaattggccgtggcatagacagcagtaagattgggatgcgaatgtaattttcctctatcttatgaatatttaaagaaaatttgtagaagcaagggccatattgctactttatttatttatttatttattatttttgagatggagtctaactttgtttcccaggctggagtgcagtggcacaatctcggctcactgcaacctctgcctcctgggttcaagtgaatctcctgcctcagtctccggagtagctgggattacaggcacccgcaaccatagccagatactttttttttgtatttttagtagagacaggttttcaccatttggtcagattggtcttgaactcctgacgtcaagtaatacatccgccttggcctcccaaattgctgggattataggtgtgagccaccatgcccagcccataatgctactttagagaagagaatatccggttaagctagagagtgatatagagaatttacccacataactgaaaactttttataagataaaatagaatttaatttttatttttttttaaggatcctgctaattttagcagattttatttatgccacatgacaagtgtttgtgtaattaaacagctcactttgttctgagtttactatgtttgcttcccaatcttttattgtggaagtcctacttattaaccctgccttcccaaatcagttatgaagataaaggtgtaaactaaaaaacaaagctggtttatgagcaaggttgagtaccagaaggaatggagttccctaaattataagagtttaatctccagttttaatccgtagatgtaccctgactgccacttattagtcacgtggccttgggcaaggttttaactactctgaatctcagtaaaagtatataaatgagataataatatttacccggaagaggggttgtgacaactcagtaagataaagtgcataaagggccgagcatgctctggattttatggcattgcgtgtggcgacagtattgtaatgtaatgacttaaaaataaaactaaccaaggagattctaatcgatgattggatcattgtgctccctgttaggccaagagataaaaataaattactagagaatttttgggtcaatggcaattcttcttttagcaagtataagatgaatatgatcatatatcctttacttacttttggcttgacacaaaacatatgcctaagctgatcaagaattgcttagaaagtaaacgccaaattattttttctgtttctctttttttcttgccttcataaactgaattattaatatcctatctgctgtaatttttattttctgtgtaaaggagaatggtcgtagtctaaatatccacctctgagaacttaaaggtgggtcaaatgttctaaaattacaacacctttgctaaaatgtcaattctgactattaaaagtgaatattaactatgttgagatcaacttaatatgctaaaaatgaactatatttgggttgctattaattaatgagaaatagaacaaattaagttcaagaacattaaaaatctacccaactttacatatttatttacttagtcattatttatttattttaaatgatagactttgtgtcttcgatttacaaaaaaattgattgggaagttcagaggttccataaactccctctcacccttgcctttagtttcccctaattaacgtcttgcattgataatactgtaaaccaaaaacaaaattctaagcccctcaactgactgatggaccccctcttggccatgagtattccaaagtaaacttgaaaagggagttcaagccaggatgcgaagaggggtccagtgtgcctcattatactctcctctctttggaactcagacacaactgatcagcattaaagttaaaacagagatcttaagactgagaaaacagattccttgtagcaataagataccaaattccaacctaataataataaatctaagtgacttttattataaataataaattggtttttacatatggattcatagttgtcaccaaatcaatacatctttacaagtaaatcacagcttgggttcaaacagattcaactgcaaatcttaaagaaatatattgacctcataataagctaaactgtacttattctcacttaaccactttgtgaaacagtttatctgctggttatttttaaaggaagtaacatattatgtagcatctacagtttaatgatgtacattctagagcatttgtccttaaccccagcagcaggttaccaccacttggaaagctttttaccagaatatccagagcctgtctcccctgcagggattctgattgaaagagtcactccacctccctcctctttctcaggtagtgcggagtttccccaggtgattgcaatgtagacccagcattaggaccaactacatttgggtcttaaaaacctcaaaactgattgaagccaagagatattaaaacaaattatttgaaatagctgtataaaaatccatcataaagaattgagtgctttattttaaaacataaaagctcatggcttatcaaatattgttcccaaattataaaaacatgaagcaaatataggaataacatgaaactgccctccctgccctacccttatgggtacatgggtacattccatgcagtagcaaaaatgtataaatatcctaaatgtccaccaatagagaagtgattgaataggtgtcatgtataatcataataagagccgtaatagtattttaaaaggtttaaattttaaatatatctctatgtactgaaatgaattataaacattatcagttagaaagtaataagacaagttaaagaacaatttttttttgagagtttagctctgtcaccaggctggagtgaagtggaatgatcatggctcactgcaacctggccctccagggcccaagtgatcctcccacctgagccttccaagtagctggggccacagtcacacactaccatgcctagctaatttttaaatttatttgatttgtagagacaaagtcttgctatgttgcccagtctgtcttgaacttctgggcacgcgcagttctcccaccttgacctcccaaagtgttgggattacaggtgtgagccaccacagggctgagtcacttttttttaaattgacttttctgtcaagcagagtggcctacgtcatgacatggaaaatttagtcaattatggtgaacaacctaataaatatttaattttgtgtgcagacaacctccctctccatctgttcttctcctcctcaatgtttctaaaatccctgcaataccaatctaacaaaagttggattcctctcaaatggaccttgatcatgtgcctaagaattaaaacataataatcctttgagaaacatctatgaaagatgcagtatgaaatgttgagaagtgagtttgtagcttccataccatgcttcggttgaatttcatttccaaatacccagcggccgttttgcatggtgtagctgggctatggagcccaggctcctcatgatgggttgggtgactgaaacacatttttttcttttaggtgataaccagctccttcatcaggcttctctttcccaagtttaggaagaagttgactacaatgtatttccctagcatgcctgttcccttgaacaaaggcaggttcaggagtgtagtgaagctccaggctccaaaaactctttcactctcattgcactctatccaatgtttcttaatgctaggcacagcagaatcacctcagtttattcctcaaaaatgatggttgaatttatctggccaggcattggtagtttacagaagtctaccagatgattctaatgtgtggtcaagactgagaactatgtgtttaattgggttcatttcaagaatactgtaaaaattttatctaaatactaaatatccataaaagaaacctcggtaatcaggccaggtttttgagtttttccagattagcccaactacaggggaaagagactttcgcactatatcccagagtctctgctcctgcttccagcctcaatgcactgggcctttctgctgccttggagcacttagagggattacaggaggagtgatctgtggagttttatctgctgtagacaggacctctcagtgatgcatgcagtcactgcccagggtgcagctggggaagtcacataccgtttcaactcaaactggtacactgcaattcagttctcataaccatctggagttagtgcagaccccataagttaaagagtatggtctccagcaagatggtcctcgcttcatactcagaggctgcaaatccctgagcttcccatgacgttcctgaagctcaaaaattcactagaatgacacagaattcaggaaagcattatacttacagttttattgtagaagatacaactcaggagcagctgaatgaagagacacacagggcagtttctgagagggtctcaaacagagcttttgtgctctcttcttgtagaataagggcttgtcactattacctggaaaaaaaaaaaaagaaaaaggaaacaaaaagacaaaaaacttggttcatttgcctggcaagtaacaaacgactctccaggagaacataggttttgatctataggagttttattacttgtcccaaggtaggagaacaccgggaatattctccaaagcagtgtctccccgaggaaaagtgacaggtgggttttatggagttgtggagaggggagaaggtgcatcatcgcatgtagaggaggggcaccagtggtgcagactgagacattatgccagcacataggttacatgttatggtgatgaatctgtagctcctcccagcgtagagactttagcatggtaatgaggaagcttcactcagattcatctataagttgctggggtctgtctggaactggttccagctgactaggtgactgcattccatggacggtttgtaaaaaacaggctgaaaagtgggaggctataaaacaggctgattgttcaagctggttaaacttctatagtccctggagaccctccctgtctgcttacatcactttcctggcacattgatgtattcaccaagcgggaagtttcagcaaacttccctgttcattacatagatgtaattgattaaacattggccccattattgaactcaagctccaactccctcacttttctggaggtcaggctggttcagagctttaactctctaattacatgttaggtctttctgttgaccagcttccattctcagtcatctcatctcatgagcataaactcaaaagtttgatccaagggatcatgaatatcaaagactcttctattacctgggaaattccaaggatatagattctgtcttccaggaaccaggttcaaaggccagttaaattctttattatgcaacaaaagatttccctgaaaccagacttagaagtcttgaaagagatgggggattcaatttccacacaatccctgggctctagaacaaaggctgtcatcactgtcctcccctggtccaccattttgggttgtggtccctctctctccttgggaactttttcaagaatcagtattcagtcttccaggggctcttcattttacttctataccttgagatttatcacctgacggtgcctattcttggatttccacacccacactctttttactattcattctctaaaagcccaactaaacaaaacacaatcagatgaacctcatcgttcccccttttcccaatagtacttaattgcccattaacaggagatgaagtttcggaagatactcactcccattcttagagagaaggaagtgtttattctgcatgcacttttaagaaaccaggcagaaagcttttttgtttcattgttcaggagagattatgactaaaaacaatgccattacatctcccattaaaaagagtctgaactctgggcaattcaggataaggcacgtgtataagccattcttgtgttgctataaagaaatacctgagactggctaatttataaataaaagagacttaattggctcatagttctgcaggttttatagaaagctggatgctgatatctcttggcttctgtggaggtctcaggaagctaacagtcatggtggaaggaggtgaagcaggagcaaacacgtcagatggtgaaagcaggagagagagattgagagagaggagagagagagagaggagagagagattgagagaaagagagagagagagagattgagagagaggagagagaggagagagagagagagaggaagtgccatacactttttaatgaccagatcttgtgagaactcacgtcatgaagacagcaccaagccatgagtgacccacctccatgatccacacacctccaccaggttctgccccccagcattggggatttcaattctacatgaggtttagctggggacaaatatcccaactatatcagcatgtaatctactgcttgacataggtaagaagtaattcttcacaattatttcaaaaccatttctgaatttactttggaatctaaagttaatttggaacaatatattttatcaaattagctccaaagcgatatttactcatgcatcatccctctgaaatgtactctgcaggttgtatgttgtacaatcttaagtatttcaattacctttaagcaaaaacagtacaagaaaggattagtcattgctgaaaatattatagatcacatagattcatttccagttttcagtgttgttttttaagatagtaggtgtttgatagcttctagtcaccgtccaaagggtcatggtctttctgatctttttgttcagaaatttgttctttctggtcaggcacggtggctcatgcctgtaatcccagcactttgggaggccaaggcgggtgaatcacaaggtgaggagttcaagaccagcctggccaagatggtgaaaccccatctctactaaaagtacaagaaagttagccaggcgtgatggtgggcacctgtaatcccagctacttgggaggctgaggcagagaattgcttgaacccgggaggcagaggttgcagtgagctgagatcgtgccactgcactccagcctgggcaacagagcaacgctccatctcaaaaaaaaaaaaaaaaaagaaaagaaaaaaagaaatttgttctttctgatcacatatgactcaggatataatgaaagaggatcaagcctctaagaagggtggactgaagctagcacaacaatatgcctgctatatgaccatggcagacttcttcctagaatccttcagatccacgatcttatctaattatgtataattcccacagcagctctgcaagatagatacttatgtcccaattttgtagatcagaaaattgaagttaaggagatatgttcattaatgaataagatggtaagtagtagacataggattcaattattattattattttattattatactttaagttttagggtacatgtgcacatcgtgcaggtttgttacatatgtgtatacatgtgccatgttggtgtgttgcacccattaactcatcatttagcattaggtatatcacttaatgctagggattcaattattttgataattcaagtttcttccaaagtgtcctatgagtaattgtttctacggtactctatacaacatatactttcaggcacctcttctcagttggtaagtttgtaaagtgttttcctgattggtacaagatgaaagtgtatgcccagcaggttattaaaggtaagctaactataagagtcattcattcagtatattttttatagagtagcctgtatttctgctacaaatgatgttggcatatatgaattacactcattgttttttctatttaataaacactgaattatgttattctacaataatggcatggtgaagatggttaaaagtagtgacagaaaaatttgactttttagaagcctctaatttgtgaaattaaaggaatgatttcttctaccatgaggtcatagatattgaaaaccatttggatattgtttaaaccagtttaattttatataatttatttcatgagctttcaagtccgtatctccaatgatcataccagacagatccccaattcagaagttatcttgcctctgacagtgcttacaacaactaataaccaggttcaatgacagtgatccagtttcggcaggtactataattgcagattatactgttcatggtttcttctttgtgtgaatagtaagtgtatgaaatcttcagtcaacatttccttttctgttgcataaacagtgctgaaagcttaatgatcagctggagaagaggcgtaatgaatagttgcagcattgttcattaaacaccgtggtggttctttctttgccatcatttcatctgtgcttgaattttgcatttccttctattctgtcattctccttaagcatcggacactccctccgtggtaattgctgtgacacacataaagcttctatcatacaacaatggaaatgtctctccttctccttgagctcattttattggagacactgtacttttgaggatggcaaatctatggaaagtgactcatccaagcatactgtaatagatggagagatttctttagatatatgtggccttttgtacaattaagcactgtattgcttttcagtaaattaagagtaaaattttaagtaaattgggtttggaattgggatttgcaattttttgctataatttattttagatcacctattacttttttggtaattttgtttctactcttacataccttgtgttctacatattgacaaatcatgctctatttgatgaattacatctttaagttattggtatgttactataggtaatgtttttgtatcatcttcagtagcctgttagcatattatgacaacatgctattcctatctccccagggccaagcctcaattaactgctgacactaagaggccttcactccagaagtagattccaaaacacatgttgcaatgaatagaactactttgtatttcacccaaaacatttaagccatggctgtttattacattgtgttattttattcatggattaaagctttggaatttggtaaaggaaaagattcccagagactgctattgaaatttcctagtaccctttggtttaaagtgtagaggaacaattttccagataaatatggaattcgcttttttatgttgttctttagagagctttagcctatttggcactaagtataattatctgcaaatatgagtttgtttggcaagatattcatgtgtccttaggtattaatatgtcattttggggaaaaaataactcaatggagttctgtcattatatgaataatttgtgatgagtaatttcctaagcaacatcagaagcaccagatgacgatttttgtttttagtttgcaaaatgcatttattgtataaggatgaaaggtaagtaaggaaaagataggttttagtagctgagaaactttagagtcaggttatacttaggtggatttaattgccatactttgttatagtggctaaagtagcccatttgtcatctgtgacctatttcagggaacaacaacaacaacaacaacaaagaaactgtggataacatcaccccctccccacctttgttgttcttcttgatgcctatttgacagaaggattgagcactttctgtttctgttgcatgggccactctctctgagacttctcccacagtattcatatccctgcttcaggaccacctcctctgaggagccttcctgaccaacctgtataaccctttgttacacaaccctttgttcctccttggagtcactttcactgtccagcttctcaatttacccagctttttttcattatacttttcagtgcctgaacacacacacacacacacacacacacacacacacacacacacacacacagtttcctgtgttaaaatggttaaaatgtcagctctctggggggaaggaactggtttgtcttacccagtgttatgtccccaattgcacagcagtggcgtgtttcagttatggtcctgcctgtgttcaccatgtaagtgggcagacatgatagaaggagatctattatacttccttgtgttatgtgcctatggaatagagggaacagtggagaaagtgaataattatacctgggacctggggaaaaaactgaaatgagaactgacatgttaatatatgtcaaaagattgagaagaggctggggagaaatataagaaaggagaatttcactcggagtaacttggataaaatctctgagtttgaaaagagtatggaacattcaagaaacagtgaaccaaactgtgattggagttctattcccaacagttgcataagggaaactgaaatgaggtgggtctggagaggtagcttagaattaggttttgaaggagtctctgtaggttactaagcatgatcagcttggtgttttatgactgtattctgataactgtgaaagatggatgggagggaagcaggaaaggggtcaggaagtagacagtgtaagtgaggatggttgtgtgtacagaagtgagtgggagaaccacagatggctcacaagagaacatgtgagagagaccctgtgtcagctacagtttgtattagttggttgattagggatattattttggttttgctccgtaaggtggttggggccgaagctctttctaactcaccaccctgctatagtcagggtatgggccttgctgtcatggtccaaaatggtgattagtgctttaccctccacatctgttctaggcagcatgagggtagggtccaaaagatgaggggaggggaagccatgtgtaaattgtgtttaaaaaattattataaaaaacacataaaaaattaatcatcatgtcatgtgtacagtacactaatgttgactctatgcacattgttgtgcaacagatctctacaacttttccatcttttgcagaactgaacctcagttccctttgaaaagttagactactttagataactcacaaacatgaaatcgtgaaacatttgtctttctgtggctggcttatttcgcttcacataatgtcctcaaggttcatccatgttgtagcatataacaggattttcttcttttttaaggctgaacgaattctattgtatgcatagaaaacgtgttctttaaccattcatccacggatggacatttaggttgcttccacctcttggctattgtgagtaatgctgcagtgaacatgggtgtgcaaatgtctccttgaggtcctgttttcagttcttttgaatatatactcaggaatgggatagctagaggatatgggtaatttatttattttttttgaagaacctccgtatgtttccatagcagctacaccattttacattcacaacagtgcacaagggttccaatttctccacattcttaccaacatttattattattattatttttaataatggccatgatatctcattgtggttttgatttgcatttctctaaagattagtgatgttgataatcttttaatatgcttgtgggccatttggatatcttctttggaaaggtatttattcaagttgtttgcacattttttatggagttattttgttgttgttgagttgtaggagttctttatatgttctggatattaaccctttattagatatatgatttgcaaatatcttctctcatcctctaggttgcctttcactgtgttgactgctttcctgtgcagaagttttcaagtttgatgtaatcccatttgtctgttttactattgctgcctgtgcttttggtgtgatagccaagaaatatcgccaaatctaatgttataaagcttctcccctgattcatccagtagttttatagtttctgggcttatgttaaagaccttaacccatttttaactaatttttatatatgatgtaaggctagagtccaactttgttcttttccatgtgggtatccagttttcctgataccatttgttgaagagacagtcctttccctgttgtgtagtcttgacactcttgttgaatatcatttggtcataagacctgagagtttatttctgggctgtttcattctactgctctgtatgtctttctttatgccagtactgttttgattagtgtagcctggtaatatgttttgaaatcaggaatcatgaggcttgcagctttgcttttctttctttgttttggctattcaggattcttttagatgtcataagaattttgaaattaaaaaaaaaatttctgcaaaatgccatttggattttgaaagggatttcaatgaatcagatctctttgggtagtatagacattttaacaatattaagtcttacaatccatggccatgggatatcatgccatttatttgtgtgtgtgtgtgtttttttttttccagcaatgtcttatagctttcagtgtacaaatttttgcctccctggttaagtttcttttcaagtattttattctccttgatgatattgtaaatggaattgttttcttaattttcttttttgtttgttcattgttagtgtgtagaaacacagacaattttttaatgttgattttgtacgctgcaactttgctgaattcgtttatgagttctgacagtgtgtgtgtgtgtgtgtgtgtgcatgcatgcatgcatgcaaaaattttaaggttttctacttataaaatcatgccatctgtgaacagagatcatttcacttcttccttttcacctgttggtgccttttagttgtttttcttgtctaattgctctggttaggacttccagtactatgctgaatagaagtggtgagagtgggtatccttgccttcttcctgatcataggggaaaagctttgaattttttcttgttgagtataatgttaactgtgaaattttcatatatagcctttaatatgctgggtaattttcttctattcctagtttgttgagcgtttttatcatgaaagggtacttaattttgtcaaattcttttactgtatccattgaggtgaccatgagattcattgtcctttattttactaatgtagcatatcccattgattgatttttcatatgttgaaccatccttgcatcccaaggatagacctcatttggtaatggtgtgtaatctttttaatgtgctgttgaattcagtttgctagtatttttttagggattttgaggatttttgcatcaatatttatcatagatattggtctatagttttattttatggtagtttctttgtcttgttttggtattagggtaaaaatggcctcataaagtaagtttgaatgtttcctcttcaagtttttagaagagtttgggaaaggctggtgttaattcttccttcagtgtttgccagaattctccagtgatgctgtttagtcttgggcttttgttgttgttgttaggagatttttttattactcattcaataatcttactagttatagagctgttcagattttcatattttcatgttcagtcttggtaagttgtatgtttctaggaatttatcactttcttctaggtttccccgttgctggtgtatgattagttatagcaatatcttattcatctcattatttctgtggcatcagttgtaatgcctcctctttcatttctggtttttgttatttgagtcttctctcttttttcttagtctagctaagggtgtgtcacttttgttgatcttattaaaaaaaaaaaacccaaatcttactcttgttgattttttcctattgtgtttctagtctctatttcatttatttctgctatgatctttattattttttcattctgctaactttgagtctagtttttcttcttctttttccagttccttgatgtataaagtcatgttgttgatttgattttttttatagaaatataggcattttactgttacaaacttcttttatattaatgcctttgctatatcccatggattttggtatgctgtgttttcattgtaatttgtctcaagatactttctaagttcttttatgatttatttttgactcattcattgttcaagaatgtattattttcatctatttgtgaattttccagttttccttttgctgtcgatttctagttttattacattatagtcagaaaaagatgcttaatattagttcagtcttcttaaatgtgttaagacttgttttgtgctataggatatgatttatcttggagagtgttttgcatatgcttgagaagaatgtgtattctgctcttattctgtggagacctctgtatatgtctcttgggtccagttggtttgcagtgttgttcacatcctttgtttccttatttatcttctctctgattattaatgagttgtcttttttgttttttagagtcagtttcactctatttcccaggctggggtacaatacataatcatagctcaatgcagccttgaactgctaggctcaaactatcctcctgccttagcctcctaggtagctgggactataagtgtatgccactatgctcagctgatggtttatttttatttttattttttgaggagatgggggtctcattatgttgtgcaggctcctagtcttgaactcctagcctcaagcaattctctcaccttggcctacatgagttgtcttttaaggagtgtttgcagaagctctttgcagtacattggctgaatctcattagctctctttggtcatgcttacatgcaaaaaggctggaaaatgtagtccaattccaggtatcgtgcacctctaaaaataaggattatattcagaaaaagtgaagaatagataatggggagcagactgcattgggtctaacatattagatcagaatctaatatttttaaggtaccgaatgtatatcctatcacatcttgatttggatgaggcttttcattttatagatggaggaaactctgaagccttcccttgtgtgtctgtgatatatgagcttttaacttctcatttatgaagttacaatagatatataattcttaccttattgtgtgttctctaagaagcacagtaaaaataaaatgaagctttaaaagtttaaaatgatactgcagggaattcaagatgaaaaagatatacaatgccaaattacttccacccatgttgttacataccctattaacagcatgcacaagagacaattctatttctagattttagcaccccatttcataatttttacttgtgacgaccagagaatatgaagtaggaagatggcctgtggggagatattatgcatttttgttattgaatctcaccactaaaaattgtgtttagtaatcacttctccatcacctaaaaattggtaacaggtaaaattgaaacaaatttcagtaagataattttgtcattgggtacctcacttgaaatgtgcatttctgagtggagaggaagatggatgattctaggcaatttatactaatttctacgtgtgcatctattaatttttgaagaaatactgttagcgaaaactgtaaatgtataaagtggttctgatcacagtggaggaatggaataaaaattaaattgaaagcctctcatgtcaggctaagagatcgttttaaaatcatcatgcttatttacaaaagctctgtgaaactggtctaagttaaagaagaaagaaaatgagttttagattagaagtgagttatggcccctgcttttcctagcagtatgtccagtttattcacagtgttctccgcagttctggggcattctggggaaatctgttcaggaataacccatgatatcttcttggggcttggagagagtggtaaacagacatactgtgggtcaaactttgggatatccatcctctttcaaccacagagttagacattgatttttacatattgaacttctgcattagcatttccctggaaaaataagtagttctgaggcaaaagaaacaaaccattggactaaatcatgctgcttttatctctcctccaacagaagactacattttagaagtcattttatcaaactttagatcttctcatccttttccttcccaccacctctttgtaggcctaaaatttcatgagttattcctatactttaaaatatatgcttggtaaaggaagatttatctttgagcaaatgaataattcagaggctagaatttccctgagattagtttacaaagtgaagactccaacccagaattcaaatttctagggcagaaaagatgtttgtgctgtttcctccacataacagaaatgcgactgcgttttagtgctcattgtgaacacgttcttggaaaaaagaggtggaatgcaagtcccagcagaataggcacattgtatatgacagatgctacccgctttctgaaaagactcatagtcctcagtttttgatgtaagtaggactcattacatcaaatctctctttaagttttaaataaacataaagttgtttccaaaataatacaccccctctataattaggtggagaaaacaactgttatcagccgttgactacacaagatctatatcagtccttgatgccttccttgaaaattccatttttcttatacatgctttggattatcttaaaattagctagatttgttttacattgtgaagataaagatttctcaagtttcccaactctgttgagtcaacattgagccccttatctttcctcaattcactgatctagctgcaatttctcatgcaatttccaattttgtttatgccgtttgaggacctcacatataccaggtggactttcacattatactaacacataaggactacgaggacagcaataactgtatccagatagccaatgaatagtgaattcagctatgatataattatcaaaatataaatgtacaagtgattctttgattagtcttttgaggattaataacgaaagaacctagaaacattaatattaatcacattagtttttagaacattaaagttagagtcttctaaataagaacattttctaccggccagtttgtgttttctccctataacctctatttttgtgtcacataatttaccttatcacatggacatattttacactttacatctcttatttatttaaattacacaagtagtagttgcattaattgctgggcatggtggctcatgcctgtaatcctagcaactctggaggctgaggcaggaggattgcttgagagctcaagactagcctggacaacatagaaagaccatgtttctacaaacatgaaaaaaatagccaggtatggtgacacatgtctgtagtttcagttactcaggaggctgaggcaggaggactacttgtgcccaggactttgaggctgcagtgggctgtgatcttgccattgcactccatcctgggctactcttaaaaaataataataatttgacgcattaagtttttgggttgtatgtgccatctttaacaattcaggcttcccccttactaatcttgtggaaagcatctcctgaaataatctcttccaatttccgactaaaatggcattgaagagagaaaaagatgaaatcttgcaacttccatcccatttccattgcataccagcaggcagcctactgcctggatctgaaaggggatcaatgtaaagatactctgcctagattgtgaataaagcagaagtgacttaactttcataagacccataaagtagaccagtcacactgccccaagaaaggaagaaaaacatttcaggccattgttgtttgctgctggcctctgaggccaaaggcttcatcagctagaaaacaatgtatctcttaccattacaatcgtggtgctttatactgtagttaaggtacattcttccactgatgatttttttcttacatttactcacagcttccacctccaagaggaaagtggggggtgctctgaggaagcatgggaactacagatgacttaccacattgtgacaagtgtagtctccacagttttggggctgtgacagcaagaacgtgattgcaggtgcaggtgtgctgagatggttatgctccagtactgagagccataggacaggagagggaaggagaagcttctacccccgtttaacagagccacagtggatgagtgatttctgttcaccagacacgcctgtgacatctacctgtttttaacttcagacctgagaaggtgatttaacagtcactcaaatggcaagtaagcagacaaaaagaaatccacatggcatgcccaagggcaagcgtcagaagagacaacatagagctcataatatacaaagagcagcagtgcattatcaacctaaatgtttacagaaagagtatgcttctgatataccaacgataaactaaaataaaattttagaaagtcattgtatagctacaagagagttttaaaaattgcataatatgcagtgtctcaagaaatatgtcaccataacctttacttgaaagactaaaagaaaacttaatttgattttcagaaaaagagtggtgaataaaagtgttttaaaaactgaaaaattttagtatacatggggaaaatgttgtttgaaatggttaaacttaaagatattggttagaaatgtgattataaaactaaatgattggtataggttagtaagtgtcagggaaaggaaagtaaacaaaaggcaatgatatgcctcatcttttgtggcaggagtcaaaagatgcaattcatgctgaacctacataggctgaaaaacaaggctgatcttccgtgagtcagagggagtcaatttgaattataggatgaatgaaacttctacgtatcctgagctctaagtcacagatggaaattatcccttccagtaaagcacccatggcacattttcaaaaactggaaatctgtttaccacaagtactgtgatataaaggcaaaatccctcagtctggcatgatctagacctctggggtgtgacttatttttgcattttaaccctcaaccaccacttcccagcaccaaccatagttccatccagattccactgcccctgagctctaatggtgcccacccctgggatgatctcatttctacctcccccagacctccttccacatcctctgcagagaggccttttgtggctcacctacttctcagggctctttctcttcctgaatccttgttctggtcattgtctgaatatctcacttgtcacaactggattggaccttattttgtccattgttttgttttttttccatgacttggtgttaattcctagaaggtctggatcgtataatctttacttttcttcttccttattctcctcactccccttcctcctccttctttttccttcttttatctccttctttctccttcctcctcttactcctcctcctccttctaagtcttcccctgcgctaggctgtagctcactgttaatgcttggttcactgaatgaatgaaaacaagaaaagttgtaagagccttaaccataacactgagttacattttgtcttcctttccttgttttaaattgcgattttgcccataaatgcattctggaaattgagtcattggcatttcatagaacacataatatctttgctctgaaaacaaaagcaatcttatacttcaaatctttataaaagtagagttaactataaggccaccttttacatcttgatacagtaggggatggtgttttgggttgaattgtgtcctttcaaccccccaaatttatatattgaagtactaactcccagcacctcagaatgtgactttatttggaaatagggtcattgcaaatgtaattagtaaagatgaggtcatactggagtgggggagaccgctatttcaacatgactggtgtctttatataaaggagaaatttgtgcacagacgtgcactcagggagaatgccatgtgaggaaggaggcagaaatgagattgatgtatctataagccaggaaacaccaaagatttgcaggaaaccaccggaagctaggagagaggcatggacagatccttcagaatctctcagaacgaacctctcagaaagaaccaaccttgctgataccttgatcttctttttctgaggcggagtcttgctttgtcgtccaggctggagtgcaatggtgcagtcttggctctctgcaacctctgcctcctgggttcaagcaattctcctgcctcagcctcctgagtagctgggattacaggcacccgccactacgcccagctaaattttgtacttttagtagagacgaggtttgaccatgttggtcaggctggtttcaaactcctgacctcaggttatctacccacctcggcctcccaaagtgctgggattacaggcatacgcccagccaataccttgatcttaaacttccagactgcagaactgtgagataagtcctgctgtttaagccacctaagttgtggttctttttaatggcaaccctaggaaactaatatagatggtggttttattaagaaaaagaaaaataaaggcactcttatatttgtatgtttatattaattgccccggaaggctcttggcagcctcagaggttttatagcccaagtatttctgcagggaaggaagggacataccacatgatgaaaggtaagtttttggttttctgtaatctgattataagaaggttgtgtatgtgagtgtgtgtctatgtgtgtgtgttttaataagaataacatgtgcagctaaagccatgggattatgctcacaggttgctacactcatacaaaaatgaaaatattttatgaatacatgagctgtccatcatgggcgtgaatctgctgattaccatagtctctcatgctccgaacagacttcttcatgaattttgagttatgcttggaaaatatcttgcagttcaacaggccaaatataaaccacgggctcttgcttaggcacgggcctggtcttgcttagtatcgccatcttccaaaacctaatctgtaactgtactagcttcctagggatgctgtgacaaagcaccacaaactgggtggcttagaacaacagaaatgtattgtctcatcattctggaggctagcaccaaggtctggagtccaggcagggtatcagcagtgccatgctgtctctgaaactataggggaaggacactttttttgtctcttccagcttctggtagcctcagccagttcttggcttgtggtagcataattccagtcttggtctctgtctattcgcagtatccaccctgagtctcttcatgccgtcttctctctatgcatgtccctctgtgtccaaatttccccttttcataagaacactgtttatgtaggattgaagcccactccagcaacctcattttaattccatcagctctctaaagacctcatttccaaataagattgcattctaaggtactagggtcaagacttcaacttatctttttggaggtacacaattcaactcacaacagtaaccaaaatgacttttcaggctggtgcccagactgcctgtcatctgacagaattttcatgtatggctgttctggttgcaaatagcagggcctcactctccccattggccttgatcccattgctcatagtggcattctgacattcttacaatttgtataacctttgtgctatctaatttgacccgaaagccccagagtaggcatgttctatgagtatgttgggtttttttttttctagcaggtaacatttccagattagccgagccaaatgatatggtaacataatagatttccacctttgcacacctgaagtgtatgacctagtctaatcactgactgtggaaacagtagctaatatgacaaaagtgccgtcggggacttcagcacttcattatcgcagggatggcttccaaagctaaccccctcagtgagaaactcaggcatcccagattccaggagttttggaatagaaccccgtatttgtattgtgttggattgataatattaagaagtttacttaacttctccctctgagtgtgtttccattttaaaaataggagtgttaatgcctcctttgcagagtagagagtgctcaacacatggtaagtgctccttgtctgaaggttgcttattccactccctaatcatagtggctacaaaagatcatccttcagactcaagtaactgaagcctgtgggcattacatattcttgtactttttcttctattgtaaaatctgcaggacacttgaaagttgttgtttatgttgtttgtgttaaaacgcttatttttttaagatgatttttagattcacaacaacattgagggaaaagcgagatttcctatacagccccttcccctactcaggcatagcctcacccattatcaacattcctcaccagagtggttcatttgacttttaataatctccaaacccttagattccagaaaaaaatgcataggttgtatagtagggaagaaggtcatagtttatatttcttgagattatacactttctctctcaaaccaacggttctggccatgtgaggattttgtcactcccagctgatttggagatcatcacttttgcaatgcaatgtggaactcttgtctgcgtttagccctttctgaggacacattctgtgttttgctagactgaggcaagttcttgtgctttttgttgaaacaggcagtgctgtacagtgggaagatgctggaggtacaaaggaaaggccaggctgtgaatcctaacactagcactcgttaggcaagcaatttcacttttaccagcttcagttttctcaaagtgtgaagttagagggcaacctataggcccatcctcatttcccacactgattgcaaatttgtgggtctaatgcaaattgcaaatatgagaatcctcaaaactagccctaggttcgataatgcactaggaagaactcatagaatgtgctgaatgctgtaatactcacaggtacagtttattacagggaagtgttgcaggttaaaatcagccaagggtaaagggacatggggcagggtccaagaacatttccttgtggagcttctagttgtcctctccccagggagtatggacaactttacttttctggcaaaaacatgtgacaatacacatagggtattgtcaaccagagaagttcagtcaagccctggggtacagagattttactggggctccatcacattgacatagtcgaccacccacatggcagatctcaggctcctgtctctgagaaggctgagctgataccacatggctcaaagctctcaggctgaatcatactgttaggctcttcagtgtgacccaaggccctcaggtaaacaaagacgctcttattacatatgagaatcataagaaattacctccaggaagtcaaggactaaggccgtacctcttttggggcaaggttaataaattctttactacacacatagatagaacaagtgggtaatccttagcgacctgtctagtctgtaaaatctacagtgatgcaaatgtgcagccctgcttaagggcatagccaccgtcaccttgtttaggaactgtcagatctgccctctcatggccagatggctgcatcagcccactggtactctctgtgtgatatgcccgagggtttagggatgtttcagaaggctagttgtatctggcaaatgggtaactcttaattattgtatgacatttttttctgtatttaatggttaagatttagggaaggggcaatatgtgaaaaaaacacgttatgagaatgtttcacatttagaccttgagaaattggtatttatttatgccagttacctatgtctctgaggtgccaagaggatgaattaatattttatttcacttgtggagatattcagaaacattaaagtccttggtcctcatgagaaaagaattttcttgagacttgaaagcattactgcagacattttgctaacacattttttgtgagctgtgttaattgcacctacctttatcagtcagaagttttgctgatttaaatcagatcccagctaacccaagcggggctgcactgaaggccacatctctattgcccagatttcccaggggactctggaaattaaccagaagccctcctgctcgaagaccaactcttgaggcgtatatgatttgcatagaggttccaatgtgccaagttcttagaagtttctgggagccatacagatgattactattccaaatgttctcatcttgggttccaccctttttattcaatgagatttgacttttctactttttcactcccatcttcaccacaccaaaattcatatctaacagtcattgtgtatattatgaaagttggtctcaatttagtcaaacctgggtttcaggggatatagctcacataaaaaggaatgggaggtatcattatatggaaatacctgctgtgtgccagagcatcctttaaggtattttgttttctgtgatattttcaaaccctccactttacagatgaggaaagtcaggcccagagaggtcaagaaaatcacttcaggccaaacaaggtcacatggaaaagtagggattcctgtgaactcaccctgtgttcttcctactccttcatgctgcagaaactctccctgaatccaaatgatgccgctgctgaagtgtgggctggttagagtgcatcacacagagccaagcctcattgtacgggaaggtaaactgctgccttcagatggattttgtgtatctatggatatcatcagttgcccagcatttctgtgttatctgagaagtatttcattgtattactggcatgttcatggtgaataaaatggcaaaagtgttattaaattatattctttgctgtcccccaacacagctataaaaggcaacgctttatggaaagaatgatacattcaaaattcagtattcatcttttgctaacattttcctggtttgtgtgtgtttttatttgaatacatattattagtcaatgtagccataaactgaaaacctttgtgtttgaatttttgtaaattgcaatcttgcccttgagaaaaaaaaaatttaaaaatgctatttatgcttgttactactaattagggtggacacaaaacaatcgaatatctggatttgaccattggagggttacagattggttagaacatcagcatttatcatatttagatgactgattcatttgcagccagtcatgtggctgctgaaattttcccttaagtcaacgtttctgatctccatatgtaggagagtcgtaccaccgttcaaattggcattgatcaggaagggccaagagaattttcttcttctctttctgaagtggttttctcaggcaggactgagagaagcttcaacagttgaacagctgttgtctgtcctttttcctctctgtaaaatatttcctgatttgcactgatttcccttcctgagacttgaaacagcaaaacagaaacaaattaggtgtgtatcaggaatgaaatacctcctgtttattgagagtttaataataatctttgcaattagcgtttgacatcctggaaactcctactgctgagcttatacacacacacagaattttcaaacccaatgtggccaacacccccacagacacctggagaattcaactgctcctagaaaaagtggattggaattattttattcctttgcaaactttttgttgatctctaacctattggggtccaagcatgaaatggctctgttgtattcaacttctgacacttaccctccttaaattggtcaggaagccccttttgtgacgtcttggataaattttaaaactttttgttacagttgcttattttaagtcatgccaggtcagcaatcccattactgggtatatacccaaaggattataaatcatgctgctataaagacacatgcacacatatgtttactgcggcactattcacaatagcaaagacttggaaccaacccaaatgtccaacaatgatagactggattaagaaaatgtggcacatatacaccatggaatactatgcagccataaaaaaggatgagttcatgtcctttgtagggacatggatgaagctggaaaccatcattctcagcaaactatcacaaggacaaaaaaccaaacaccgcatgttctccctcacaggtgggaattgaacatcacacaccggggcctgttgtggggtgggggaaggggggagggatagcattaggagatatacctaatgttaaatgacgagttactgggtgcagcacaccaacgtggcacatgtatgcatatgtaactaacctgcacgttgtgcacatgtaccctaaaacttaaagtataataataataaagagtcatgccacttattatgccttagtccggtccactaaaacaaacacaaagtttagttcttccttttcctttcctcaacctgaccaaatttgtggtgatttcacttatactattgaagtgtgcttgtgtgtgtgtgtatgtgtgcgtgtgagagagagggaggggagagagaaagaaggcggcaggggggtgcggagagagagagagacctcttttttaccccatgagtagagtaaggagaaagtagaagaaaacaggcatctccctgcttatgcaagacttgtttcagataactggtcacccaaatggtggtctcagcctcagaagttggcaccccagttagttcattcctgggtttttttgtttttcagtgacacagggcacttttttctacctgtgttggagtagagtgtcacaataatagctgaatggagccttgaactcctggcttaagcgatccttccacctcagcctcctgagtacttgggactaaaggtgtgcataccctgcctggctatttttttttaaatttttatttttgtagagaagagatcttgctatgttgcccagggtggtctaaaactcctggtctcaagtgatcctcctgacttgggattacaggcatgatgcaccacgcttggcctcaatcctgtttaactgacctcattggacacttggccgttaacttctggctggccaggctaatgcttctctgagctgtttgtctctctggcctcatctgcagcaggccctgcaagttggtcacctgcaatttcatctgccatccatagcactgactctggatcttgacaggggacttaggggctcacatttattttctcccctcctcttgcctgtactgccaggtcatttctctctaacactcttcctgaattccagtagcaaaggtctgtgatcctgtggctaggtagatacccacaatagaactagctgtttgtctccattcttgaagatcctcccaaacttcacaagtctgttggttgagagccccatcctttgcttgggatgagaaacctatggagaggggtatgccccttgaggtgatttctgtttgtctttccatccttctcttgatggctattatctcagtggaaatagacctaacaccccagagaatcttataacttggttctcagcagggctctgtctttcctgtaattactgtgtatttgattatctctggggctctgaaaagacctcagtctgtaccttccagtccattctgatacattcttgtgaatcaccaagtccatctctttttctatgttggttagtaacccaagaaaataggagattgataaagtatcacattacagaacatttaaatagtatcatagactccattgcctttcttcccagaatgtgagtcattgcctttgtgatgttatgacatagtttatagcaaacataaaatggcactgtttaattctgctctagtggtcatcaggatctgaaaataaaacatatcaccagagtttttgatgactccagtctcaaattttcagtttctttgatttttctaaaatgaaagcagaactttttcatcctgtctttgtttatggcttatgttgtctaagcaggaagatactgactcattaacatctcaacatttttggtagaactgtaaagagcttttcaactttttaatctgaatattgggaagtcagatatattgaattagacttaaaattgggtagtgattattgttcatttcagtattttccaatcaagctgacagttatgaaattctaaatcaatatatttgctttatcttttatatctttaaaaatagttaggcaggtatacaagagttggggtatttctatatatttaaatatttttaaaaataaagcatggaacattttgaattcattgtggatgagggggctgatgagagttgaggtggtaagagcagagttaatttaggaagcagccctgttgtggatgggaaatgtttgctgctaatgtctatttttctgtgctggagctgacagaaatttcctttttgtttatcactttgagccttttgaatactggcagtcatgacacttatgaaaatgtatactatatagttaatgtccttttttaatctcatggaagtgaagttattttctttctttgattgcatgcaatggatgcttctaaaaatcactctctagtgattcaaatattagattaacataccagtttgctgagtaaattctctgaactctatcagaacaaagaagaaactacaagaaaacaagctgaactcaagagcttgctttctctctctctctattttttcttttggaccccacaatttccagctatgtcttagggaatcagctccaaatcagtctgctgctaaaatgatcattgtgtacacccagaataaaacataaaaatatctgcattcacaaaaggaggggtgggtgtgaatgagggcattctaaaaaagggtttaggcattgtagacatttgttctagacaggttgttaaaaatcaacatgaatgccaaaatccaggaaaagaggaaagagcacttcacaagcagtcctgctcatatcaccttgcctgtgtcacaccagccactgctgcactgtaaccactagcagttttaagggcctcactttcacctaggattttgcatagcattgactgtcttgatatgatttcacatgttatttatgtcaggattcagattactgaactggcatgagttgtgctcatgaaaaaatataactaaagtctgtattagtgttcttcagagaaacaacatatatgtatgttctgttacattatatatatatgtagatacagatatatacctgttataaaatatatgtttgttctgttatattagacatatacctgttatataatatatatgttatatagaatatataatatatataatactatatatattatatatatatacacacacacatacagagagtgagagattttatcataaggaatttgttcaagcaattgtggaagctggatctggttaagtccaaagtatgaagacccctatttcccagttgaaatctgagggctggaagctctgtagaacaggagctgatgtcccagtttgaaggccatcagacaggaggagctgatgttcctctgggaggccaagttgtgcaccacttttgcagaaataccagtggccatttattttagttctgcatttcatagccttgtcaatgatgaggactgattgggatctgtatccagctaagggtgattatgagaattcaatcaaatgtcctgtcaatcttgacctgtggcaaatgggcttaaaaatcatgttcactagatttcattacagcatcttattctttaaatatattcaagtacctacttagtagctgaagaacaggctggaaagtgaaaatcacagcaaaataaaagttgatacctttgaggaattgagtgatcctgagtgtagccctgatttatcctttttttccagctaaactttctgtttaggtgatctcatcagattcatgactttaatattctccatgctgatgataccaaaatatgtttctcagactctgacttctccaataaactctgcactcatttatccagctgctccctcagtatctccaattatgtgtaatagacaccgtaagctttttatatccagaacagaattttgagtcccttgcctagaaaaatctgatcatcacctggtgttcctcatcttaattaatgacttcatttgtcctgttgcttagatgtggcagattgtatttctccaaatgaccacagcaaagatctcatcccacgtgcttttcttacagtgtaactttggtattcatcctatgagagttggggtctgtaatctttctgcttgaaactttgtggtggcttttgactgtccccaccaatagaatacagtagacgtgatgtttggtgacttccaaagctgggacaaaaggcaaaacaacttccctctggccctcttaggagatgcttgccctggggcaagccattcaccaagctccaaggaacccacactcgccaacatggaggaaccacatggaaaggccaactcagagggacagtgagttccaggctgaagccagcatcacttgccatagatgtgaataaaccagctttaaaatcattcctacctctagcttttgagtcatttggtgatggtccatacactagggcagacatacccttaaactttgagtaatttgttatgcagctttagtgactaaaacattgcaagataatgcattagccatcctgattcctctcattcacacacccatatatcctgtaactgtactttcaaaatatagcctgcatgctgaccacttcttaactgtccaccacagctggtcctgaacaccatcacctcttgccttatttactatagatgactcctaactggtttctctgatttttccctactacagattatattttccaagtagaagccagattgattctttagaaacgttcacaagatcaagtccctattttacttaaaacctccagtaacttcctatcacatttaacatactaccaaactcctcactatcccctattaggccctgtgctacctggtgtctttttctctgaactcctttctaccactctcctccagactcacaatactcaagccacactagactcttactcttccctaaaacattaatctctgagccatagatagctaacagcagaatacatgcctgtcttccatagctgtgggattgctcctgggtctgcaatgtccagctctctttgaacccataagattaattctcaccagtaacatggtgcttcttggatagggttattaggaagcaagtgtgctgccctcactctctggatgccaaggactccatagccctaggtgatggcaaaacttgaaggtggaggcagcctaggtccctgaatcaccacatggaggaaagctgtccatcaaccaggaacgcctgcattggactgtgaatgtgaataaaacttagggtgttgttaggctactgaaattttagagctcattcattatagtacctggtatttctctacctaatagtgttattccctcctcaaagcctttatattggctactgcctgctgctcttctctcccttacatcattctctcccttgcatcatgactctgccccccatttaaaatatttaaaatagtcagtgctcccacccccacacgaatttatactttgtcatactaccctgctttatttccttcatatacttatcactgtctgaaatattcttatgtattttattttacttccgtttctagtagaatgaatactttgtaatagcagggacctggtctgtctttctgttactctattcccagcacctaggtggtgcctggcatgtaccagtgatcagcatttgcttctggataggagcaattacatcaagtagaccgagaacaggaatgaagagttgggaattagggtctttggaaattaagttagcaccacttgataaatgattcaacttctcagtgccttctcacaattgtcaaattgggataatatctattttatggaatagtctgatgattaagtaaaatttgtatgtaaactgctaagacctatagctttttaaattaatatttgttcttatttcatgcaggtttggaggggaggaaataattgccaaccttaacatttattcttctaaaataagtgagggcactgccacatttgatataagtctcatagggtggcctttccagattggagtagtcaactactaggggttgttaacacttttataatatgaaggtctgttagtcagatactttgacacatactacagcagggaattttacagccctggcaattgttttgaccatcacaccatctctaaatgatatgatagaatggccacatcctgttctgactgagccgtgcaagttctgcctttattagtttccatgtggtattgtgaattcacagtttggtggttggaggtatgtagatgacaaatctttgtttattcagatctccaggaagcaaatggtattcttttgcagagtggccaattcaggaaaaacacgtttataagctattgttatgtttttcaaattaaaaacatgaatgaaacataagagagttatattgtaatactgaaaaatattgaggaaaacatgaaattctcctctcccttcacctcttccaagtttcctgtccaagaaaaacttgaaactgtcaaggaatttagtgggtgaattttccacatagatggtattgtgcccaagggagcaaagatttgttttggggaggagtgaaaaaattttactcatatgcgtaaagtacagatatacatataacacataaacagatatacaggctgggcatggtggctcatgcctgtaatcccgccgaggtgggtggatcacctgaggtcaggagtttgagaccagcctggccaatatggtgaaatcctgtctgtactaaaaatacaaaattagctgggcatggcggtggatgcctgtaatcctagctacttgggaggctgaggcaggagaagcacttgaacccaggaggcagaggttgcagtgagccaaaaacaagccccactacactccagctggggcaacagagtgagactctgtctcaaagaaaaaaaaataacaaaaccaaaaccagatatacagtctatgtgggatattaaaatttcatggcgaggggatttcatgggagtgattaggaaataaatgtctacatttctttaggggagtgatgatgaaatgaatatttcagaaacagtggtgtagtgtttatcctcctgttgccttgtttgcacccacacacaatatatatgtataaatatttttgttgttgacttttataatcattggaatatgaataaggaagaatgttgcacagtcactgatagtcatctgatgacaggaaggggacccagcattggcttgaggcctgtgttgtagatgtcagatcagagaactcccttgtgttgtcattgtgctactgcctcaaataactgtgaaacaaatactacccccaagaattcccagtctatgaaataatacatatcctcatggtttgaaccaatttgaatcatgctttctagcacttattcccaaaaatgtcatattagaaagcaccctataccaattaacactctcatatacatttatatgtgtgctcatatatgagattctcttcagaaaaaaaaaatctatactatatttgctggattgcttactgacaatttgtatcttattacagattgtatattaatttatactgctcacttctcctttggatttgttgtggttttcttcatgcttttaggacctttttatttttcctgatgtggtctttattgttaaaatatattgcaaatatgttctccaagtcttccacttttaacttcattttttttttagagatacagaagggcttgtgaaaattatgcattctaggttgtgtcttgcttagggagaccttcccagcccaatactatgaatagtttccactaacatcctttggtaaatgcatagttttactttttatggcttaagatgttacatagaggttacatgcatatatggtggatatatgtagagtgtaatgtattgtgtaagtttatttattttttccctaaatcagtaactcattttctcattaccatttactattttttacttttctcactaatttggaattctaattttcatatactaaattaatatgcatgcctgaatttgtttctagattttctaggtgggttacattcatttctccacattttcttatgcctatattaccctctgttaattactgtaacttctttgtgggttttgtgggatggttgcggcacatgttctattcacaatccttcttcacattgttcacttttaaatttttcttgctgttatgtattttaactcaaatgaatatagttttattgtgtttcagggttaggtgagcagagagagggagagttttcttactaaaatttaatttatttatgtaattgcatagatgactataacttcaaattctcatggctatttctttatccaataaattttttaatgttgtggcctttttaggatgtagtaacttaaaggcaactttcttacctttcaaccttctcatttgtatcccactttataatttaccgagttagtttgcattttctgatttcttcctcaatggaaccttatgaaaggtttgtaattttaatgtccatcttcagaagtgaaaactgaaagtcaaaagaatgaaataattgagtaagtcatatagcagcatagtagcagtaatggaactagaatttgtctgttccacttagtgcagtgtctcggtaattagaacaaactaattctggtatcaagcgttacactttgtttactggttaaagagacatacgagatttcctccatactgtcctgcagcctgggcgttcctttgccatagttgctggatcgcctccctgtttgaacaaaacaggacagaggaaaaggtaacctggaggagaatgccacatccgctgatttcaggctcgatgaagttcaacacttcctatttcaaggtggtgacaccctctacaaatccctggctttaggaagaaacctcttgataaagacccctcatccacagagttgcctccaagcctatccttgttctaatccttcttctctgcatgaccaaaacttggtattcaaaattcaatcttagtgttttctggctgtgctaaaggggatgtggggacctcatgtttggcttacctgcaccttctaagctagcaccactgtcttacttaatggactataatttcatctccttaagctctcttcagaatgctataatgaaggaggtgtgacttgggtttggaaatgtggtggcaaattatctatatatgaattaacatgtataatttaatacacatcatgaataatgatgaattgcaagtttaacttgatcatttaagtagagggtaaaatttctctttgtccctggtatattttatagagtaaatattaaaatttgatactctggctttgtggatatggtttcatgatgtacaaccactgtttctaggcagcccactccccagtatcacattgtagacaccttgaggacagggagatcttctaaatctgcttcatctctttacttcccaagacaccgtgaccaggctctagcatagaatatttgtttgctgaataaaggaattaatgaactaatgaactaatgaactaatactactttgcacttcacacatctctcaatttcctttatttttgtattcatttctagaatcatacagtgtaaactttaggtaacaatatagagataacacttttcccatcctgtgcaatggcattttgccactagcaggatgcaggagacaattggaaaggaaacagctttaactgtgtccattttggccagctgttctttgtaaaaggtctgtgataaaatttgatataattcagcacattttgcattagttagatattaatgttaactgataacttttgctcctgttagtatagaaggagtttattctctatgaacttgtcccacaagaagcactgtcaactcagaaggcagtagccgacgtttttggtatttgctccaggttccttttcagaaaaggtcattgttggatagaaaggcagcatgctttggtggctctaccaagtggagtctatgaatcatcacctggaactatgttaggaatacaaattcagtgatgcccttcagccctattaagccaaaaactctgtgtaggaccaaatagtcagttttaacagcctgatcatgtgattctgatgagcactaaaggttgagaaccttgactctgtggaaaaaaagccaggatctgaattgggcagaactgaatcagaattttagctcagccatgtattgtatggcttcagccatgttaaagaaatctcagccttggtttctttatctataaattgtggagcttaatacccacttcattggttattaaatgaactataaaatatcacactgggcctgccagtagaagccagtcaacacatttagggttgtaatttcctttcctcttgctaccaccattgcatgaaatctaaagtagaaatagtagtttttaatcctttagatatgttattatgtatgatagtaatgtatagggtttctataccctgagctttggagttgacacttttctgacaaaagaatgtgatttacttatgtattttagctgataaatcctagatagaaatgtatgttcccgtctccctaaacatagtagctgtctgtaatcccatgtgagtcagagatgttccagttattgactgctgcataacattctaccccaaaacttactaaacaactatttagctttgctcatgagtttgcaggtaagaaatgcagggaaagcttggctagcggagtagtctctgatcagtgtgttcttggctagggtggcaggggctagaggttcccctccaagatggctcctccagtcacatgtccaacctccttggagctggtcttgctctcacatggcatcccatcctccagggtctgtcctcttgttttaggatttccacagtatggtggtcagggaaaatgcacttcctgcatagtgattggctttcacgaggtaggtagtggaagctgccaggccagttaagacctctgcttataaccgacacaactcgccctgttgctcagagcagtcacacagcctgctcagagtcaagggagagaagaaatagattctgtctctcgttgggtgagtgacaagtcacaatgcaaacaaatgtgtgggatgggagatgttctgctcatctttggaaaatatgatctgccacgagggctcttttttttttttttttttttttttttgagacggagtctcgctctgtcgcccaggctggagtgcagtggcgggatctcggctcactgcaagctccgcctcccgggttcacgccattctcctgcctcagcctcccaagtagctgggactacaggcgcccgccactacgcccggctaattttttgtatttttagtagagacggggtttcaccgttttagccgggatggtctcgatctcctgacctcgtgatccgcccgcctcggcctcccaaagtgctgggattacaggcgtgagccaccgcgcccggcccacgagggctctttagtagggaatagtatgttgttctttgtatgcagctgttaccaaaaatgcttaaaatagattgaatttaacgattacacctaaacatacatacatgtattttaattacgtttgttgtctaagttttgccttttaatccttagcaatgtaatttgagtcaagtcaggtgagttgttagtgtgagagtgagctgtcatgtcatccatccacgtccccgcttggactgttttacacgacgggacacacgtccactttcatgatgcagtgctaagggttgctctgtcaatgtaaaagctgtgtccgagcctcagggcatgtaaccttacagctccgtggtggagttacatgctttgttgctgaaggaaggaatgttttcattagttttctttatttttgttccctcagtgggatgttattagtcatgtagaggcagaatttctgtcctcctccacctccaaccaggaagtattaatcactgtttcatctgtgttttcgtagcatttgggttattatattattgttttttgctgattattttaatcgtacaaaaaatacatgagtacattctgtttataaaatttcaagcaataaaaataaaataagtgttcacattaatctgcatccattttcccatgctaatcccttcccagagataagcaatgttatcaattttgtgtacgaccctccagacatattctctgcatcaagatatacacagatatgtgaacatgtataatttactccaatggaatcatattctatatattgtggtttcctttattcatttaaccgtattgagttggagaaatttatatgtagaataactttattctttttttaaaaaacagctgcatagaaggagaatcacttgaacccgggaggcggagaatgcagtgagccaagattgcatcgctgcactccagcttgggcaacagagtgagactctgtctcaaaaaaaaaaaaaaaaaaaaaaagaagaatattagaaaattacaaaaaaattcaataaaaacatctgcaacaaattccatctcatgaccgtacagtagtgaatttaactcttcccctacagatgaacgttgagattgtttccagattttcactgaatacaataccctagtaaaaatttctgacattgttctttgtgcacctgggtgagtatgtgaccctgtgtctagaatggaatactggatcagacagtgtgcatgcccttatcaaagatactactgccagactgtcttccaggaaggccattccacagagagtcaaccccctaccacacggcctcatcaatgatggctttttttaatcttttctgagttttgcatatttgataggagaaacagatatatccagttgttgtctttccatttccatgttcattaattaggtgtcccatatttttccgtgcttattgagcatttgtatttcatcttctgtgactatgttttgttcattttattatggataccatagaagtgtatatgttttcttgaaacttcattttgttccattgataattattttattcttgggcccaaacatattaaaatgtaacatttacccatttaatattaatttaatacaaaatatataccaagcatcattgggcattagaacattacaaatacaagggtaaagaaaacagacaaccagctgtgttcctgacgaatttccggaaagtgctgaagtattaaaggtccatcctaggccatacctacatgggtgaccctggcacaggcctgagtttttgctggtggctctggttatagtatattttgatatctggtaagatatctgagaaaaatttctgtctctctctgtcatctatcaatgaattcttccatctttctatctactacttattagatgtggggacttagacaaattcttatcagatgtgtaatatagatccaggccatctggcttcagagtttatattctttcttttgtagatttaatagagtttatattttttcttttgtagatttaatataaaattgtaaattttagaacttgtcaaatttcatagaaaagtcatttgggactttgataggcacagtggggtgtgtaataatgtattaaatatttttatgatactgagttatcccacttagtaccattgtagaccttcattaaatcatctatgattttatgtcatttccataattttgtccttgctcattattagatttatcctcagatattttacaattttgtgctgatacaaatgggatcttaatagcattatctaactcctttatagtgtaatggaaagtgtgaattttttgtatgttgaccttgaatctgtatattttgatgatttgttggtgtgtgtcctaagagttgtgagttgatagtctttgatattctaagacaaaaataaagacagttttgtttctttcttctaatcttcctaactcttatttcttatttctaaattattattattatttggtgtatgtattcaggacagtattgaataagataagatgatggggaaatccttgtattgttttgaacattaatggaaatgctgacttttttctgaacatttagtataatgtatactttaccttggtgatggataacttttatcaatttaagtagttttttcatgctttttcttgtactaagagcttttaataaggaattgagtttgaattttataaatgtttttcaacacattcaaaggtaatttactttttatatcaattaatgaattgatttacattaatatacagctaaatgttgaactctttatccctgaatttctgataaaagctctaccttgtcataatatgttcttttaatatgctactaaatttttaataaatttatttttatataaatgtaatatgtgtatatatataaaatatgatattatgtatatataatataacctttttctaatgagtaaaaatggcccacctttcactgccttatcctcttgtttctggttttagtatcagggttaactggctctgtcagatgagttgatttttcttatattttctgttcttctatttatttatttatattttttgtagaaatgggagtcttgctttgttgcccaggctggtcttgaactcttgggctcaagcagtcctaccaccttggactccaaaagtgctgggattacaggtgtgagtcattactcctttctattttctacctttggaaacagatttcctaatataagaatgatcaagacatgaagtctgatagggtctacctgtacatcagtgcaggcttgatttcttcaagtcatcttactagtataccaactttctcagtggttattttactgtttagataattctctttgacccagttttggccatgtagcttttcctaggaaattagtcctatcttttagatcattagttgtatgaaattttttatactgcaagtaatagtttaataaaatcatatatgtgacatcattaataaatacaaattttatctatagctttgtcctttttcatgctatttgttttatatttgttctctctctttattgcttttaataggagataggttatgaaattaattgagcatgtttgtcttttcaagaacattattttaaaaaattttctattttatacacttaaggttttattttttactaattatttataactttatgttttgatatatttatattttaataggtccctaatattcattatgtatcatatatttgtagctataaattttcctttgaatacaatatcatctataattcataggtgttaagttttattgctgattgttgtttttgtataagtagtttgtgatttccctgataatatttatttaatccaagtttttaacagaagatttatcttaacatttttcccttgtgttttttattttattattgtataggttttttttctttcattgtttatgaatgttgaattttatttcataattgtgaatgggactttttgttaactttagaaatattctgagatttcctttgtattctgctacactgttattttaggtaatgttctatatgtgtttgaaaaaagtatgtattttcattgtggtgggtgaaaagtcgtatgcatattagatcaaattattaattgcattaaatatattctctatatttttatttatgcgtgcttatatagtctgttgatttcttagaaagttagattatccaactgtaagagtgagtgtgccaatttcctttcatattcttgatttttttcccatttatgtgtttggaagctaaatttttagttccataaaagttaatgtctttcatagtgtttgggtagaagaattttccatgttgtttaaatggaatagctttctttgtcttcatttcctattctttctacaatttctgagccattttatatgtctcttttgactgcatatggctgtatgcttaaatttccaatcagaaagacttgttaggggaattgagaccatccacaatattgtgtttactagtgtatttggacttgctcttggcagcactccttctttattatagtatgtttatggatatgcatataaatatattatgcctgcaatgaactatgaagcattattgcctggcaacatcaaccttagttttagttttattttcctagtagttttctcattttgattaaaaaccacagaatgtcagtggaaagaggggcccctgctctgtgccctgcatttgggcaggctctgcttttgttttgggcaaggagaataacaaatgcttggagcctgagccactgcctcaagcctcctagggcctggtaggcctcttacaggattctcattggccaaatgccaatcagtgagtggatgaccatcctctttagactctattctccccaataattaaactctgtcctaatcaatcactctaaggcatgactgtgggcaggggagagtgaaagtgatgggcagaatttggacttgggactgggtggtccacttaggggtgtattacactacttgccacgcaagttgaagctgagggatgagagtgagaaagtgagatgtcacctccctttttgttcctcttgcacagctctgacgttgggggactgggcacccctcttccagctgccgtgttttggcaggaactctgagaatgcttgaacttaaaactggcattttggatctttacgtagtggtatttccaagtaagaggaatagagcatactttatttaacaactttgatgtcctgacttactacttttaaacactaagatttatgtgggcttccattgttactcttacctcaggccacagacgtcatagaagagcttggaaaaagttaaattcttggggagaatagaatagaatctaaagagggtgatttttgactccagcatctctcaggtttctgtttacccacctgcaccttctcttctggttctgaggcaggtgcttatctctttggagatgtgctgaggcagaatcagatcaacagctcttgcagagaagacgaagtgaggcgaggttgttaggtctagagtgcagaggggccagattagagtagccctggttggtggaagtatcacagctgcaaggataacctgagtttcctgtgggttaagaataggtcatgtaaggtatctgactgaagccatcttgccaggtctcctgtcaacagtggagcattgttgaacagattatgaggggtaagagaaggacatgaccgtgcttttgctggatcttctgtgtcagggacctgaacaaagttttcctgtctcccctgccaccaccagcagagcagtgaagagcaaccaatatgtcctgagggagctgcttttggaggcctgaaacatagaaggaaccaataaccagcatgtgttagaggaacaaaaacaaaaaaacaaaaaacaaaataacagctgtaagtaataagacctgcaaatgcaaatcaatgtcttgttccccctaaaatcaataggtcccctgtgccttccggcacactcacacactgacacaaccacatctggctttcttactggtgtagacaggagggacgagcagggggagcagagagagagagaggaaacaggcttcttgaggcatttctagtctgagctgacatttcattttaaaatggaaaatgatacacaaaaaaatccagcgtgaccagaaaaaattataagcctgatacttgtagttgacaagagtaagttacctttcccgtcaccagttcacctggtgctgataattcagaaagcacatatagtatcaggtactagaaaaagtaaatcattccacatttgcctgttgctaggttgaggcaacttaataatacctgctgatttctctcatgtctggacattttgagtgtgtgtgtgtgtgtgtgtgtgtgtgtgcacatgcacttctgtgtatatctgtgcatgtatttacaaaagtagagtcttgtattccaatgcccgttttaactcaatctcttcatacagatttcattccaacatttgtcacaagatattgcactatttttttttagctgtctatctttactgctagaaggagattttttagaggagactccgatttaaatattgcttctatcatagtgtaagacatatagtagattctcaataaaaacctgtttcttacatttaagctagtgataatgtttgtacctattaagggtgctgaggctattttccaagacccagttggaagatactttaaaagtaacttttctagatcatctgttaatacttctgtagccttttacaggaacagaggaaaagtaaaataggcagtgaggaaggaagtgctgttatttttgtgcatatagcatagtaaatgtgtatgtacctggcatttactggtaaatcaacatgtcagagagatgttatttgttactggctctgtgactaattatccctctagatataatcagtgttaaaggtagtgaagtgcaaaataattgcaacaacaagacctatgattcatttcaaccaggtttatagagtaaaagattctttttcttaactttagcagttttttaattgattctgtaattttacaatggcaaaaaggtagtttgcagtgtaattctctattatttccgtattgcaaattcaatctatgttagatatttgatgccatgggttagcattttttatttgcaaattaagtattttgtgaacccaccatatgttgaatgatatgtagaacagaggcatggagaagccagaaatatttgtgtgtgtgtgtgtgggtgtgtggtgtgtggtgtgtgtgaaaaaaatatgctagaccaaggtatggagagtcagacttccaaaactgcatatctcatctgagtacaatccttctatccaggggagatttaggtttggtggggctcaaacctcatacaatttaggaagcacattttaagaataacaatacaaaattaagaacacaacagtggctgggcgtggtgactcatgcctgtaatcccagcactttgggaggtcaaggcggctggattgcctgatatcaggagttcgagtccagcctggccaacatggtgaaaccctgtctctactaaagatacaaaaattagttgggcatggtggtgggcccctgtaattccagccacttggtaggctgagataggagaatcgcttgaacctgggaggcagaggttgcagtgagctgagattgtgccattgcactccagcctaggcaacaagagcaaacactccgtctaaaaagaaaaaaagaacacaacattaagtattgtgcctatgcaagtgaagagccccgaggcttaagcttcatgcgcttctttgtaaatatttctctttttatatcaagtcagatttgatacttctctctgttggacatgtgggtatgtaatagcttattaaggtgaacagaggtcttggcatatgggtggtatagaagatgttgtaaaggtgaggacgaatttctaagagttgagatgtaaagtattgtttaccactgataaagacttgtatttataatatggaaatttagaaaacagagtgaaaatatctattatttaataagtaatggaaaagatcaactatgatgacagggacttacacttctggcccagttggagtaaaagagaccttctgaatgagacagcaaaaaagtaataaatggacagaatatatgaagcaaaggttttcaagatactgaacatcagacagtgaagtacagtgatcttgaggtaggaaacaaatgaggaaagtcatatgattgtgccagcctactgctttaagacagtttccaacgtgtagcacagggaggagaacccaggtggagcctggtgatcttgaaaaggagataaagctgaaaactgcagggagaccatggtggctagaatgcacaggacaaagtactggagagaagagatttgtctagagaaaagtctcaaaagatctgtaggtagatacattatgacagaagcatagacatgtgatagaagcaatatgtaaagggatgctttgggtatttagtagaggactgcacagcacatgcaggtgaggaaattactaggttttggaaataactacccaaaatggttagtgggaacaatacctgacactcacactgggccagggatagtgcctgttcctacctgtcgactggaaatttcataaccatcaggacattggatagtactcagagtgtcatgccttagttgtggagactaattaggcatagactaacactgtttgaataccacctccaaagttgtaaagcaaaaaataaaggatatagattattttcaagtaatgtaagtacattctatgaaggaaattaaagaatatctataggaatacaaaagtaaatatcaagcatcctacatggtaaaattcacaatgcctagcacccaatcaaaactaaccaagtatgcaaaaaagtggggaaatatgatccatattgagacaaaacatgcatcaagaaaaatccagaacagcgatagcagacaagaacggtaaaatagttattaagactacatatcctatgttcaaaaattaagtacaaagaagacataaaaatataaccaagtcaaatgcctagaaatgaaaaaatactgtttgaaataaaaaatacactagatgagattaatgtcagattagagactacaaaaaagtaagtgaattggaaaataattatttaaaataaagtaatagaaactatcatgaaataaaactaatagaaactatcatgatgaaacacagagaaaaaacaatgaatgggacattagtgatctgtggggcaacttcaaacatcctattataagtgtaattgtaactcttaatgaagagagggaggacagaaaaaaatgaatcaataacggttgatttttttcaaggagctcaatgaaccataagcacaagaaattggaaggaaaccacacaaaggaacatcataatcaaattgtttcaaaccaatgattttaatttaattgcatcattaatacaatgtaatttaatttaattttaaaaaacaatcttttttaacttttaagttcagaggtacaattgcaggtttgttacataggtaaacttgtgtcatggggcttcgttttacagattatttcatacccccaggtattaagcgtagtacccattagttgtttttcctgatcctctccctcctcccacccttcacccctgaaaggccccagtgtgtgttgttcccctctatgtgtctatcatttagcttccacatataggtgagaacatgcagcattttgttttctgttcctgtgctaattgctaaagatagtggcctccagcttcatccatgtccctgcaaaggacatgatctcagttttctaatagttgtataacattccatggtgtatgtgtaccacattttctttatccagtctatcactgatggacatttagacagattccatgttttgctattgtgaatagtgctgaaatgaacatatgcatacatatggctttataatagaatgatttatattcctttgggtatatacccagtaatgggattgttgggtcaaataatatttctggttctaaatcttcgaggagtcgccacagtgtcttccacaatggctgaactaatttacactcctaccaacagtgtaaaagtgttccttttactctgcaaccttgacagcatctgttatttttttgactttttagtaataaccattctgactggtattagatggtatctcattgcagttttgatttgcatttctctcataattagtgatgttgagcttttttgtatatgattgttactgcatatatgtcttcttttgaaaaatgtctgttatgtcctttgcccactttttttatggggttgttttttcttcttttaaatatgtttaagttccttacagatgctagatattagacctttgtcagatgcatagtttgcaaaaattttctcccattctgtaggttgtctgtttattctgttgatagtttcttttgctgtgcagaagctctttagtttaattagatcccatttgtcaatttttgcttgtgttgcaattgcttttggcatcttcctcattaaatttttgtccatgcctgtgtcttgaatgacattgcctaggttgtcttccagagtttgtatagttttgggttttacatttaagtctttaacccgtcttgagttaatttttgtatatggtatatggaaggggtccagttttaatcttgtgcatatggctagccagttatcccagcaccatttattgaataaggtgtcctttccccattgcttgtttttgtcaggtttattgaagatcagatagttgtaggtatgcagtcttatttctggcttctctattctgctccattgatctatgtgtctctttttttaccagtaccatgctgaagaaacaaccttaaaaacaaccagagaaaaaaaagacatattacatacagaggaaaaatacaaggatgacacaagatttttataccgagccaagcttgttatgactgtggcatagtaagccaatcactgagacaacagttttgtcatggagaataagttttagacaaaaagcagagcaacaaagagatgggaaagcagctctaaaatccccctccccgataatggagttatagggctctttatgggataaaggagcaaggtggtccaagacatggggaaaggtgattgagagtaagaaaatatgaagcaattgatgatctgcacaagcatagtcaagcttcatggttcttcataggatgcatattcacaaattatgtcattagcataatctgagagtggagtttttggccctctgacatcaaaaagtcacgcatctatactcacacaggcccatttggagggtcagtggtctcagtggcttgaactggatgagaactaactctaagttcctgaaaaacaacttaagtaattgttaccatggtgacatatatattagagacattatgtataaggaagctagtgggagtttagttaaacttgtttagccacctgacttttagctacataacgtcttaaaatcaactgaaagcaagtgactaaaacaaggcagagtaagttaagttgggcaggcctaatctggtaagccttcagttttagtatcttattggaaacaatgagaaatcattggagcacggtcttgtggacatatagctctacacacagcaatgaagaacactggaaaggctttgaaaaaaaaaagaaaaacataaaatacaatgaaaatataaaacttgttttatccaaggtgccagtatctctactgtttgcctactgcaatgccaggatctcagagacaaataaaaaatgtgatagaaacaatcccctatatcagtagttgagaggacaatgcaaacaaatacatcagagaatattatatgagctcatacaattgtgtaacatctatctatctatctatctatctatctatctatctatctatctatctatctatctatctattcatccatccatccatcccatggtaatgcatgacatttatcatggcaggtgtctcagtctgggttttcccagaattatatcctaagatgagggttagagtgcaagtaaatcacttgggaagtgattcctggaagcaccagcaacgagtgggaaagtgagatggggaaaagggaaaggcaggccacaaattaaagtatcattatcaagaagataaacactgtgtgcaactagagtctaatcacaccaggaaattgtggatcagtgtacagcagtggcctcaggtggaacttactcttgcagagagaatcatggccttccaaagacaaccatgccctaatctccagagcctaagactatgttatgttacatgtcaagggaaaattaagatttcacatgtatttaaggtcactaatcagctggccttaagataaagagaatatcttgcattatccaagtgctcccaatataatcacaagggtcttttaaatgaggaagaagaaaacagatggtgaaattcagagatagatttgaagctgtggctggcttggaaggaagggggctataagctgagaaacagaggaggcctctagagctggaaaggacaaggaaacagaatcttttcttgagatttcagaaggaatttaactctgttacaacctgattttagcccaattagacacattttagatttaataccttcagaaatataagatatttgtattgttttaatttaccactaagtttatgttaatcccttacattagtaatagtaaactaatatacccacttgaggggtgaggtagttgggtatttataacacataccattggttggtaattgcttctgtatgtggaaagaaagtggcccccaaaagagagagaaagccctttggttgctggaggttagctaataggcactataaaggtaaggcctgctggaatgtgggcactgcacttactagtaaaataggctggcctccctcttcctgtcctttccaccccttcttcattcatctaacatttctcgagcttttattatgtaacagactttatgctagatgctggaaatagaaagacactgtatacatttctagcctagaaggttcaacaaagaggaaaatgtttacatttcctagattctcagttctagactctaggatagattgctgagatatttttcatcaatggaaagaaacacatttttgttgggtttttcaaagaacgtgacatgacacaccatttttacaagggataattttagtgcagaataaaatagagcagataaactgtcacccaaatgaagaaatgccacatttattgttctaaggcgtccagagcaagatatctttttggtatgaatgtgcaattctacacacaattatttctttcttggatgtgagctaatttctattggacattaaattctataggaaggtgaagattagtctatctggatgcctgtttgtttttaatgaagatgttacacaaaataaaaatgaagagcatctgataaacttgtatacaaacactcacacacaaatcttctttaggcatatctcaaggtatttttccttcctcataatgtgctatttacacttgactcataataccagtttctaggtatttcagaatacccagaagtttagcacaaatacaacaatggttatgctacagtggaaatgaagtaagcaatagatgctactgcagtaatttttgaaatttctttgttcttataaatggtcaggcactgcattaaaatttggaagattgcacacttgcagcctctggtgacttcccagattgaatgaggtattgcctccctcatactcttgtaacaatctttagacctgtatttctcccttccatgttgtagggtagctatttatttaatgtctgtctactgcagtaagccgtgtgtgctcctgaaagctgggttttgataatcttattgttctttctctggcatctagatcatgcttgacatatgttaaattctttaaaaatattcaccaaatcagtgggcaaaagaagttgacaaactcaagcaatgtatttcgtatttattattttataggcttaaagtagacaattttgttctgtgttggctgagttaatcacttgtgaaaaacagcaaaattatattgaatttcaaacacatgataaccttctgttgtattgagctaatcaatgggtgtgtttatcttctttttactagtaccatggtttactgtgttttccaaaatactctttgtcattaattaaaacaaaccacattatggtaccatataatctattttctaaatgaaaacactctgtggttttgaaagttcgtttctggtccacaaacaaataatttcatgctcttatcctcatactatttgagtcttagtttttccatttatacaatggagaaagtaaaaatagaaatgcagttttttatttcagagagttattatgaggatcaaataagctggaggacatcaaagcaaatagtatatcatcttttcttttactttttattttttatttatacctaataattgtacattttgtggggcacatagtgatgttttgatgttttgatacatgtattgtatcagatcagggcaattagtattttcgtcatctcaaacatttgttatttctttctgttggaaactttaaatatcctccttctagctatttgaagctatatattatcattaagtacagtcatcctatagtgctatagaatgctagaactttttcctcttatgtagctgtaattgtgtattatttaacaaatctctccctatccctctgttccccttacccctcccagcctctagtatcatctgtattaagaaaatacggatatatggatgagaggacaacaggttatagattttgatagtgggatatcttaaagggaaggaactagttaattatccataaattccttcaatggtgtgaatattgccctttattatggcataattcttaaaatttatgctattgctttgagaagcacatcgaagagccatgccaaaccattctataactttcaggaccttggacagcttctttgcttcaagatagccaagaggttaaggcaaagacaacccaacagggcaaatttttttttctgaaaaagaaagtttgtttttaacccacactgtagcgttgtttatagcctcctcccagttcatccttgaatccatagtatatttctctatacatactcctggataagaagaaacaaataataggaagataaagttaggtattgtcatcagagcattaacacagtgatcttattttcgtaaactcttaatatcatatatatatatatttgcatctttcttttttctttcttttgtttttagagatagggtcttgctgtgttgcctaggtttgtctcaaactgctggcctcaagtgatcctcttgcctcagtctccaaaaacattgggattataggtatgagccaccatgcctggcccagcatcttatgttttgtagcatctagccataatgtatttttaaaaatttcctggccgggcgtggtggctcatgcctgtaatcccagcactttgggaggccgaggtgggcggatcacaaggtcaagagatcaagaccatcctggccaacatgatgaaaccccgtctctattaaaagtacaaaaattagctgggcgtagtggcgcacgcctgtagtcccagctacttgggaggctgaggcaggagaatcgcttgaacctgggaggcagaggttgcagtgagccgggattgtgccactgcactccagcctggcgacagggcgggactccgtctcaaaaaaaaaaaaaaaaaaaaaaaaatttcctgtctgtctgaattcaggaaccccaggtaactttgtgtcaatgttatctctgatttcctccacagagtctctatgggaaatattgtagaggttatggcttccaccctaacaataatataacataaaaggaaattctaaaatcttgctcatatctaatgggagcatttttgggaggcattgtgcacacattgctagagagctatgaaggaactgtttcaaatgaagagaaatgcaagcctaggcagtatgaaatgtatcttggtaacagccctctgtcctgtaatttatcccacctagttttctttttgtttagattgtcccacttaatttccttttgtttagattgttggtttttattttcagcaatgtcaaatgtaggtagtaatttgatttataataagagcttacatccaaatgttttgatagcagagtcaaaagaaatacaacctgagccatccccagggagtcatatacatacggactcacatgcatgcacaaacacacacaggagccacatttgcaactgcattacggatttacaaaattacttgtatttcattcaagaccgctctaatgggttttaccagatcagaagtgaaaattttaaataaattaatagacagtttaacccaggttatagtcagtcactcaggcaatcagtctagctttgtctgtgtattttacaaactggccacccaagttcagagtgaatataggaacaaaaaatcaagaagaccacaggtaaacataggccaaagggttaaccaaccagcccttactaaaaaagttagtcgtcatcattttgccccacttcctcatcgcctttcatggtgtttcacaaattttataggtaaatgagtaaggatgtgatctcattcacttatctattccgtttgaatataaaacattttgtttccttcccaaatctttaattgtatcttgataaagaattcaagcttctttgtactttgtaggagttggagatttttttttttttggttgatcatgaattattgaagttcagtggactggaattggaacacttggatcggagattttattctgccaattattacatgtgtaaatttgggcaagttagctaactttagaaacagtcgtcttgtcagttaatgagggtattattatatctgtaatgcctttcatcacacatggcttttgggggagtcagataataagagtaaaagtaacttataaactgaacaaataaaaaagacaatgatttaccaactacttccaacattactatttaaaccatgactttgagatgctatattttaagaatgaaaaagaaagtaatctttattttaaggagaggggcaaggcaataattttccataagagggcacagacactatatacaaaatggaatctgtctcagttttcagaattttcatttgctagctcgagtgcaagctgcttgtgttagtttgcgaggacttccatacaaaatatcatataataggtgctttaaataacggaaatttcttttctcacaattctggaggctagaagttcaagagcaagttgttggaagatgtagtttcttctgaggacctctggcttggcctgcagatggccaccttcttgctgtgtcctcacatgatcttttcttttgtgcacacacatctctggcatgtttttgtgtgtccatatttcttataaagacattagtctcattggattaggacccactctaaggacttcattttaagttaatcacctcttgctcttgctctaaatacagtcacattctgagttatggatggttggggcttcaatgtatgcatgaagggagcataaatccgtaacgtttgacttttggatctccaaaatccctgtccttctcatatgcaaaatacattcaccctaatcccaacagtccaaaatctttaccgatttcagcatcaattctaacttccaaaactcatgtaaatattatctaaatcaagtatgatgagagacttgaggtatgattcatcctgaagcagaatttcactccagctgtgaacttgtaaaattgtacaagttccgtatattgaaaatccattgctaagacaggaatgggatgaaaattctcattccaaaaggaataaatatgaaagaagaaaggaatcatagatccctagcaagtttcaaatgtaacagactaaattctattagatattaaggctcagtagtaatcctgtttggcttaatgccctgcgctccaggcccactggggtggtggctctgctttgtgggtccaccgggacagcaatgttgccttagccctgggaaatagcgtcgtcttctgatgccttgagtgacagtcctgtctctatcatcctgggaagtggcagcctggtccactgaagctaaggaggtgcccctcattctgaaatcaagaaagagacagccttggctttccatcctcccaccagacctgggcccatggtgagagtggcagtcccgccaatctctgaatagcttctggggtcattctttcatttccttgatgatggataacatatgtttacagccatttaacttgattaaatggatattgaattctcccatcctgtagaattctggtattccaatagcctttctttatttggggctatgtctgtcccctttagtccaagccgacagtgttttctgctgatataagcccatatttattcctggcttctgctgagataagtgattagatctatgagtcacatccataatttctttatggagtaattgtccagctacattcttggttttctttccaaaacataccttttattttttttcaataggaataagctgataattattcaaatattcaagttctggttgctttttgcttaacaatttcttcttcaataatctctttcctcttgcagtttactataagcagtaaggagaaactagactgtaccttcaacactttgctcagaaattatttcagctgaatacccaggtttgtcacctacaatttctactttccacaaaacactgggacacagttcagctaatctctctgccattttatggtaagtgttgtctttcctctagtgtcaaaaaatatatttctaattttcacctgaggccacaacagaagcaagcacatttaatgtccatgattttacagaaagtttgttcaaggcaatctaagcttcctctaatctgtgcctcaaacctctcacagcctctactcattacttctaaagctgcttccacatttttaggtgttcagttctttagcatcccacatcgtggtaccaaaatctgtattagttttctggggctgccataacaaaataccacagacaacaaaaatgtattttctcatggttaggagactagaaattcagtatcaagtttcagcaagcctgagcctctcttcttggcttgcagatggccatcttctgtctctgttcccacgtgatctttcctttgcacctgagcatccatggcagttcttttttgtctacaaaatttcttcttcttacaagaacaccggtaagtttggattagggcccaccctaagagcctcatttttacttaatcacctctttagaggacctgtctccaaatacagtcacattctgagattctgggagttagcgtttcaacatatgattttggaaagacagtttcgtaacttaacaataaatgaacaatttgagcttaacataatgatgaattttgacttaggaagaagcatagctttagcccatgtaacactgttgtatatcatcactgtgaaaggactggcatcttagtgattttaaaaccatgtttccctgagtctcgggcagtgagtcaggagggctatgtagactgtgtccatggttaggtggagatgctgatgggtttcggctctcagacctgttggacacagatgtaccataccaggggaaagtgctaaattgcttgtaaattcactggcactccaatactctatccatgtctggaaataaatgaacatagagtctgtgatcatattaactgaaccacacatttggctaggaatatcagatgataaaactgagtaattaaaataaaaattgttctaggatacctggaatgcacagcaattgctccttttcttaaatgttgatggccttacgcaatggtgttcacagcacacccctctttatcttggggatgctttctctgatggatgggcttcaaaattgctaatacacgaattactcatatttagacatttgttcttttaggtgccagactgttttcttttggaatgtatttttgtgtgatgcaatttgtcacctagatcttagcattaacttttaaaggatgaatgttgatatattggttctctttttttataatttcttgtatgacaaagtaattactacctactgtgttctaggcaccacactaagtgctattaatgtagccgtgaatttacgttgtcttcaccaagggtatcataatctaatttaaagtattttttcctcttgtagaaataccttcttccatgtataaaggcacctaaaatgttgtacagctcaattaagcttagtatctttcttgttttactcaatctcagtttataactgttgtagattaaataatggcccttcaaatatgtccacatcctgatccccaaaacttgtgaatgtttccttttaatgctaaaacaatttaaatatgtgattaaggatcttgatatcgggagattatcctggatcatcctggtgaactgctataatcacagttgtttttatgaaaataaataaagaaggttcaaagaagaagagaaggtggcaaggtgataatggaagcagagataggaatgagtcactttgaaaaaggtggaggaccccaagctaaggaatataggcagccactaaaaagcagggaaagagtctcccttcaaagtccccagaaagaatcaaccttgctggtaccatgacattaactcagagagaccatttttgaacttctgacctccagaattgcaagataataaaattttgttattttaagccactgaaggttgtggtactttgtcatagcagcaacaggaaactaatagaatcacattaataatcaccagtacactcaaaatcatttatctacattcttctttacaatctgctcccacatactattaccactgttattaatttatccatcttaattgtaatccttccttccgtatttgcatcatgctcttaatttagaaacttgacattccacttgaaatcttatggtcagtttccaaatggtatctctgttttcagcctcactccttccaaacttttctccagattgtttccaaaattttctcataaaagccaaatacgaacttttttcttcttaaaatcctgtgatacctcatgagcttctgtcctgtttgccaaactcctattcactcgtcaagaggcagtttaaatatcttcttttctgtgactctttccacagacataaatgtttgcattatcttctatgtttcaaaggcatcttgaatatattttcttgaaaaatccttttatatctatcgagacagatagatatagagatagatgcattccagggcagcctgttttattactatacatatacaaaaagactcaaaaggataagtaataaaatgtattaactgcaaattccttctggaggtaacattataaaatatgtgctaataacaggagaaaagaaacagtgaaaaaatacaaaacggtgttttcaaaatatgtttttcataaatagcaaaggctttagaggagatatgttacaatgcccagaaaacacaaaggaaacacagtatgcaaagatttacacatgtatgtagacatatcagggaagggaccagagaacaggaagataaatacaataatagttaacatccattgtgtgctttccatgagccaatactgttctaagggttttcatgttaattcactaaacaatccttcgagacaagtgttgttaataaccacttttaaagttgttatggagactgagcacaacattaatacaactaggaagggatttgaactcagaaagtctgtttccagagcttgttttcatatccaatatgctttaccatctcagctggaaggttttccactgctgctggatgggcttttctgaaagtgacctaggccaagccatgacggccaaagtggcccaagctcatcttcagagatgttcactggatggtggtgttcttatttttcaactccaaactcagcctgtaattctcaccaatttcaaatctgcaatcacttaagtctataatcgctatcaatgatatttctaacacatcccagcaattcttaaaaatgtctctccttattgtaagaactcctaattccacgagtgattattaatgcagggagagagatgagaagttacctttggggatataattgaaaagtgagtaggaagcaggcagaggaagatgaagtaatgacagagattgtgttgtgagtaacgcagatactttcaataggatatgcccaagttttaagtgtgtgaattttcaatgcttctctttatcctccattgtgtcatatagcatgaatcacccacatgagtgggtcatcaaatcaattttgtgggtcacaattagcctttgataaaggaaaataacatagaatggaacagaagagcataatatataccataacatagcgtaggtatatttgcataaatctgtatcagtcatttcacactttgcaaaaattactgcaacaagtggtaagtcacagtgccagagagccaattagtagagggagtacactgaagatgcccactgggtagaatggcttgttttgtctttttaaaattaacttcttatttgattttttggcctgggagaatcactttgatcatcactgtaaagaaagggcacagtttattttatattaacataattattagttaattgtgagatgaagccaggaattatttttctatcatgaataaaagtattgagattttcagtcaagtttcaggctgcaaaattaggctgtttttcagaaagaacattaccaaatttgtaactgtaacattctagtaaatttaatactagtacccttaaaattaactgatatattattaaaaagaaaaaattatgaatttaaaaatgtaaaggtatgttttagttcaactgaaggatttcaaaatgtaaatagtgaaaacattgagaaaaatattgacaaaggagcaacactgtcaatttcaggcaaaagtttaaaatgaaaaatttagtacaaatcatgaaacctaagacactcaaaatcattttaatcaaatatgaaaaatccagtgaaaatgacgcctgtgtttatgtaatgatattttgcaaataaaaccttaaaactttcaaaattaaaatgatacttggaaataaaggttattgtacttaccatgtcttttaattatttgtaaggaagggaaaatataaattcattggcacaatgtcttattcatttgaattttttattttattttaatttttttgaggcagtcttgctctgtcacccagacgagagcacagtggcatgatcattgccatcttgatctactgggctaaagtgatcctcctgcctcagccttctgactacaggtgcatgccaccattcccagctaattttattttattttataatttgtagagacaagtactcattacatttcccaggctgaacttgaactcctgaacttaagtaatcctcccaccttggcctcccaaagtgctgggattccacaacctttaatataaaatttctactattgcatagttacagcatcattgtgtgtttaaaaaaatagcacatataactttgaaaactatattaccctgtatagatgccatagtgtgtgtgtgtgcatttttttttttctgagagggagtcttgctctgctagctcttgttgcctaggctggagtgcagtgacgcgatctcggctcacagcaacctctgcctcccaggttcaagcaattctgcctcagcctcccaagtagttgggactacaggcgcacgccaccacacccggataatttttgtatttttagtagagacctggtttcgccttgttggccaggctggtctcgaactcctgacctcaggtgatccgcctgcttcagcctcccaaagttctgggatgacaggcgtgagccaccatgcctggcctatttttaagaacaaattatctgacagaaataaaacctttattttttgacacgatatcccattttgtaacttttagaaacaatgactgctatattgatacaatccagtataaataagcaaatcaacctgatgtgagaaatgacagtcaagagtgtgtaaaaatgctagctaatggcaaatggcaaaatggcttttggagggtatgtaatgtagttaaaatttgattaaatgttctttggaattggataagagcatcgttgatcaatatgaatgacactggtaaaatgatatatgagttacaattgagagagcaaaatatgtgactaggaaattatcagaagctactaataataagctctttgaagtcacttgttaaatttatcttagagctttgatatccaaagaaatttagctgccttttatggatggggaaagtaagtgaaaaatgtttgttttattaaaggaagctcactgaaatgtttttgatatatttcgtccagagattggtgctatgcatatccatattttctaccatcctagcattcttagattgtcatgaccaacaatactgagcaaaggtaagaatcaagatacaagattcactttttggttattgttggagaataatcttgtatagtaagtaatttctaagataatatttgggttaaaatggcagatttaataaactaggaaaacaaagaaaaaaccaaaatgcatttcaatatattgaccttatccaaaggtgatagtgtagtgttttgatatttaatttacagaaatgctctgaaataactattgccatcctgctttcttaagtaaatggtctagaggtcgtaggagttagcccagctccactaccatggagcaagttaatttgtagagataagatttgaactcagttcaaataaggctctgaaagctatgttaaggcctctcactgccctccctctgtaagtaagaaatgtgaggaaaccaagatttactcattaagcatgcccggctttgatatattttcccagattagaggaacagatggctcttagtggtggtttttgttgttttcatggttattgttattattattgctaatgcctacctattttccctatcaaatgaatcaggaagctttgtccagtccctcttaattaaatgcagtgagagaaatgggatatcaatccaatacattgagctcagcttgtcctgagagtcagggtgcctagagaatatttgatatgccatgagttgcacagtgttataatgggccctgagttagtgttttgtgtatagtattcgtggtagagtcctgtctcttcccagataagtgtgtgttatataggatataacagtaagtagacataagtgcttgtttttattattagaaggctgataaggagcagagaacttgtggtcttagcagcccacattaaggaatgcaggttctatttaagtgcaatgataaatcaatgatggatttccaaacccggatgtacttttttttttttttgaggaaaagaaaaacctttgttgatgcataaggaaaggctgggtagaagaacagagttaagggtgggaggccagttaggagactgttgaagtaacgcaagtgaggcattatagtggaatggactagggtggttagagcagaaatgaaattacactctctgtatattgcagaggtagaattaatcaaataggacatctgaatatattagatggggtgagggaaaatggactaatcaaagacaacccttatttctggctataggaataggatattgtcattaactacattgggagacttcgagtacggagagtttttttggattgtggaaaattaagggttctgttgggagatgcacattagaaaactaagtgaacttgctaagtatacagttggagattaaagcaaaagagttatcagtctatagatagttagagttagtgtgtagacatctagtataagatcacctaggaaaagatatagatggtgaagaaaagaggacccagtcgcataccttaaagtacattgacattaagaaactcgacagagaaagaagaaatagcaaagaaacgcaaaagtgactgtgatgcagagatagaatcaaggagagatttgaggtttacttactatattaaatgtggagaatttgaagatgaatctaaaaaatatttgtctgttttctccgagggaatatttttatggttcatttataaagtcatctgtattgttttatgtgacaaaactggtttcattggttctttagattacttactgtcatttttggatttgaggtcataggagcccagaggggcaaaactctcagtaggaagcatcagtcgtgtcaatactgctgtgaggctgagtagaaagatgagaagtgagaactttttcttttggtgaccaacaagttattgatggccttgagaaaaatgcgactctggagatgtgtctgcagaagctggactgtagttggtgaaaaaatggacaggaaatgaaaaaatggaaaaaaaatctgtccagaaggttgactatgaagaggagcagagaaatgaagtataaattaggagaaggctaattgttcagggggcaaattttttacagtaggaatattatagatcatgtatgaaacttaagggactgatgctggagaaagtttgaagaggcaaaatatgcaaagaggaatgtttggatggtccttgagaaggtgtttgcgacagagtttgtagtctaagaagtgattgtccgtatctttactctttagatctcaatgttctcatctgtaaaacggtggagtagctgtggattatttccaagcttctttgtgacttgaatattctacaaatttattactgttagtcatgcatatgctagtaagcagtgatgaacatgggagatgtatcctgaggctgtttactctcatattaaaagtggagaatttgaagataaatctaaaagatacttaagtctattttctccaagggaatatttttatggttcatttatgaagtcatctgtattttatgtgagaaaactggtttcattgttctttagattacttatcctcttgtagaaactgtaactattttgaagtttgaggctgcaacatattcacattggtttcactgttttaatcttattttcactgcttttgccatctaaccataagatattggtgcagtaaggataattaagtaagataagtttattaacagcagcaagtatcttgaagacatacccatttcagatgtatgttaatgaccatattttttactctactatgctggaaggttttcgatggaattcccggaaaagagacttatagcagccatataaataacaattacagagagtattattggtatttatgctgaaatgccttttatattgtctttaatacttgagtagaacttaattgaattatatttgtcaaggtaactttttcctcttaagaaaaatcccgttgcttaaaattaaaaaaaataaacctagtattttctacctactagtaaaatgcaagtttacatattaaactcttgctttgcaaatgttaaattggttgaaatgagtcaaattggcaatttgtttgtaactagaatgtgtgtgagaagctgagtcaaaaatttgagaagcctccattgcccttttcaacttacatggtacttatttatgcaaaaggaaggcacatcaggtatgtcgtgacatgggctgaaacctatgtccatagaaccaggaagagttgggcatgggatatagctggttgatggaaactttcaagctgatatttcagtgttaattattgtcttcaatatgtacattgtttccaagaatcatattttgctttatcaaatggatgcattattatattttgttaatatctctgatccttttttgttcagaaaatggttattatctcaaaaatcataggatttgagaaagattacatgatataacaagtataaattgtagatcatagaacttggcacctagtaagcactctgcctcagcactcatgctcaaagtctgttaatgagatctgaatctggtggttttacagggtacaaaaccacaatgatttgtgaatatgtgagtctatggtagaatattaatgtggaaataatctggagtgcatacactgtgtgggtcccccaaaggcatgggtgattgtaggcataattaaccaaccttccttactcagaaagtggaaatggcaagttagagttttctaaaatataaaagcctatttaccagttctgtgatgagattttttttaaaaatccacacaaaaacaaaacaaaatgaaaaccacacatgatttagcttgtttggattgctatttgatgatatttaataataatagaaataattacctctgaacaaagttaattcagtatacattttgctattacttttctcttaagtaaaataatatctatcacccatgaatattttaaagaggtagctctttattctccagagtaaactatgtaaattcccaagaaccaataatttccataattattaaacaaatattatatcatagtttctgagcattagtcacagaaaaactcctgagattagattgagacaaagtgtcatgctttacgtttttactttacttggctaggattctcttattagaaacatacctattgtattattattttcaagcaaagaaaacaaaattccattgtaagttgggtcctttcacacttaatataagcaaaaactgtcattttttcattactgtaagctgattgaaaattgaaactgtgaacaatgtagctgttccaaataatagtttaaaaaataaaattatttttttctttgaatatatattttatttatcagaactcactaaaggattatatgtggaaagaatgttggtttataatttagaaacaacattttttagagatatttgcatttgcaacataatggaagttgatctcatagttgtaattgtcaataactgtctgctgtgcttgagactatatctgcccttgctcatttctcactctgcactcctggggaagtggaagaacattggccatgtctccttttgctgggcataagaaacatatataaatagatacgttataaatagatagtttcaagtaaataatgtgttctcttaagctcacaatgatgacttttataataaataatttctaccataacaaatgatttctttgcattattgcaaatacagatttcagcaataactgttttaggttccttttctaacactgtggatgagctagaatgactctctttgtcctctccttcagaggtctctcctgtcacctcctctttttctgtcttcccatttagcttaggggtctccattctataggctctctcacaccattgtcacagctgcactgtgatccaatatagacattctctgtatgatagcaactcctattgagtgccagcagatacaagtcctgcaagatgcccaaagaataaaagagatctatggtcaatagtgtagccatcttacagggtcaggattccattcatatattaaagtctttgtgagacttgcagtaatgaaacctgtgattaatctatacttccctaaattactttatcatgtgttttagaatagatatttctagtctgagaacctagttatattggaatagtttgggaaatgtcatgttactatttgaacgataagaagttatctcttcatttagaagaggtaacctagactaagaatgattgatatcacccatcagatttcatctgcttaatttttcagttctgtgcatttaacaatagaaagtttaaaacgagccatccttcaatgtgtttagcattataataaaagaacataggaaagatatagtctactgttctcattttacagttgttgaaactaaagcctagagagaggatattagttgaccatgagcacacagcttagtttaaagtagctgagatgtgagttgttttttgttttattttctttttgagacagggtcttgctctctcacccaggctggagtgcagaggtgtgatcatagctcactgtaacctcaaactcctgggttcaaatgatcctcctgccttagcctcctgagtaggtgggcctacagatgcatgccaccacaaccagctaatttaatttttttttgtagagatggggtcttgttaggttgctcagcttggccttgaactcctggcctcaactgatcctcccaccatgtcctcacaaagaggtggaattacaggcataaaccatgcacccagtcaagattgtgatccaaattcttattttccaattccaaatttagtgtcaagtctacaagttcaaactactttcattaaaagagaaccatagttacaataatcttgatagaacccacagctttttgtaaatggttttatttgtagtaatatttttctgtttgtaatatgtttctcgtgaatcacatagaagcgcagaagcattgagaaagcccatgaagctgggtttttgtacatttgtgcatatagcagattgaacccctcttttgctatttaatatagtgtgaagatttccccagtgctgtacttactttccaaaaacatgattgtttctttagacaatttcctattgttgtttccaaagttttgctatttaaaactgtattttaccaaacgtacgaaaaatgtaattgctgggtcaaagaataacaccatttctagggtttttctctgtaatgacaaattacactctaaagtgttatcagtttcattcctctcagtagtgtatgagaagacacttgtttattttttacaatcaaacatagtatcttcaaattgtccagaattctgagattactttctttactgttgactatgtaaaatagtaacttaaaatgctttttatgcctcttggatttctccctaatgtccctatttctgttgataataatgaagttttctatttatgatttaaattgccattattatatataaaacatctgtttgaaagtttaaataagatattgtgttaagctgaaaggtaatatttaaaaaaatcattgagcatttaccgtatttaacaaggttcccagtttatcctctcttcttttaaacctgactttctagtacttgagattttctttattctttcctggttaggttaagtatgcctttaactgcttttttttttccttgcataaaggatagatagcatgtcgaatagttggaaagaatttgtatatgagataatagctttctattgctcctatacattgtcaagtgatcaagaatatgctgggtgctcattcttggttcgtagttttctttttctcaaaagagtggagtattttcattttcattattttttggtgtctgattatatagaagtcaaatttgaagcaagtccaatttgatcaagttcttttaacttaatttttggatacttgtagaattttttaaatcttgaaaaattattgccattattttaataggatttactttttgtttcttcataaatctatttttatggtagctcttgagttctaaaacgtcagttttctttagctgaggaaagttatttttcatttttttctatggtaactgcacttgttccattttgctgtctttttcagatttctttcttatgtgaatttggtctctcagatatgtttttcgtatctcccactcacaacattttgtcttgatcctgctgaatggagctcaagatgaattcctgcagttttctctttcatttggctttgctaataatttaacttagtgtttttgatttaacccttggtgttttccatccaatgcaagcatttcatcttcatgtttacgtttcatatttcatagaagcaatatgattatatgatgaatgccaataaatatttagttattatagtatacaagagataaaggaaggtaacaccaaaatgtttttcctacaattgtttcaaaaatctattttcttgactgtccctgctttcctgcacttcttctcgtaggttcactgattttcctgtttgctcacttggtttcatgcatgttgtggccggaatgcatgtttactatggaatgcatctctccactgtgtttggcagcaactcgaaaccccttcatttagcttttatgctggctgtggctgtctattctgagggaagacttaaggggaagccctgaaactatcttttctgcttcttgtgattacttactgatggaaaaggctcccttgatttaacttgtgttggctgttcctggtactggcctttgccttacagtttaaggatgctgttgaatattaacatattctttcaattacttcctatgagtgtctggagataggaagtagttgaatgttggggtgaatgatagaccacccacttctgcagggttccttgtgggtcttcaatattctagtcctacagaattccttgtactttctggttcttcatcagtaccttttctagatacagaccttgatattgtttgttttgttttgttttgtttgtttgttttgttttttgttaaattggtcaatgccatgcaactgtggtcagagggactgaaattgttttcacatggctctcttcactggaaagccctgggttaatctgctcatgatcctttacatccagctctggaatttttttttctttataatgcataatgaatagctttgctaaagaggattctgctttcaaatttcaagaataaaaagaggacatctgtctgagtattaacatgatggaaatttttaaaaatatcacatagtgtgttagctcatatgtgacaaatagataatgcatctcatggccattaggaacagaatatttgtcagaacattctgtctattgtttaaaggcattggtgtaatgtcataatatttctacaaggtatgaaaatgttgcactgtgcatgtctgaagtctatagtgtatcccttagactcttgccatttagctgaattctgggggaatgttgccagtatcgttgtttcaaatgagataatcaaatggcttatggagctctatttacccccattccaccctctgtcacaatatagtaagttacttattggagcatatgcttaatgaaaaattaatagcaatgcaatatgatataatggtgcaggactatattctgactagtataagatatttacatatttttgccaattggtcattatcttttatttcacatatccatgatgagtgcatatttagaaaatgagagagtgctttctgctaatgtttctgattattagtgatagtgctgaattcatatgcttacagagagactgagagggagaagaagaggggctagaggaaggaggaggcaggagagaaaagaaagggagagagaaaggagggagaggaggaataagagtgagaatgtgaattgctgtgtgggtgggcctgtgtatatgcaacacagatgcataattttggaagtctgcattttctatatcatcattttggaaccttaccaagtagtgcaaatgctgtgatttagttgaaactaattatgggtacctctaaaatggtatctcacataaatgtctcataggcatgatttgaaaaaaaaataatttgttattattcttccttgaaagtcatgtatttaaattctttaataaaatgggtaaggtttctgtgactagccaagataaggctgcttacacttatgaatctataagagactatacatttcctcactcttgcatgctattaccagatgaatcattctattttgtatctggcgactcattcatctgctaagagaccttctgggccccacagtgcctgcagtgcacatggaagctctttaggctgacattcagggtctcctgtgatatggtgcctctctaacactgtatcgcagttgacagtttgtgtgtgctttggcctccagctaagtcaagccccttgccattctgagttatgactgtgggatttctgccctccgtgcctgtgcagggtcactatgggatgtccttcgcctccagccttctatgtctagatgctgtgcatctttacacactcagctcagatgccttctcctccaggaatggtcaccgctgaggcatcatagttgttctccttttaacatgtaaactgatggaagcctttaccttcatgtctcctaagacagtgaaatgtgaagcctcagctatgtatttggagggccccgaattccaattagcccagttatgttgtctttggtatgacacctaatatctcggaggctccgtttcttcatctgtgaaataggggtgataatatgcatgtcacagggcttgggaaaatgaagatgatgtctgagtcatgtgtagcacagtgcttggaccataatcaatgtcagataagcgcagcatactctatgatttttattaagtgccattgctctctcctataatgtgatttatttgtacgtaatgtctccctagctgtggggtccctcatatttgtctatatgtctgccccccaccccccaccaaaggcccaacttttttttttttttacctcaaatatgcacaaaattgagtctttattttagtactcagaagacagtgtaattccagcccagtttcttccattatttccagtacctctgagctgagcaggtctgggtgatttgtgagtcttcatgtgtgataatgtgtagcctctacttcaactgtcttctaggtggcaagaacttctggcttccttccctgaagagaccagctgaagtttgaagctccgcactctcaaagagcttgacagttgcaaggatattttcagtgtgataaagggcgtagtttccattggctgattttaagaagtaatacacatggaatgtgattaaacttgtgtcttctgcttatcaaacaggtggacttttaagctaatctagagagttgagctggttagcatttatctacatttaatcagatctaatgttggatagttctacttagacatgtttctctatatgactctagacattccctcctgtggctagaaatcaacctctttataatcctgcctcccaaactggccactctgattctaggaactttgtggtatgctgttgtcttcatgtcctcaattctccacactgctgtgtagtgtggaccagtggacatctcatgggtctttggagtcagacaaactgggccgcagagtcgatgttgatattactgaacacttctcagtcacaatgtcctcatctgggtaaataaggctaatattgtctactgctaggactgttgtaaaggaataaatgatgcacaagtgttatgtgataaaacaacgtgtgtgatagatagaggacccaatgaatgttaatcatctcctctatgctttctctccttttctcacaactaaacatcatgagaaataagtctagccaaaaggataagcatatatcttaagtagggcttcccttttacctgtaaacatcctcactttttaaaaaacatagcatgaaaactttgtgtgtgtgtgtctgttgcccaggctggagtgcagtggtttgatcttggctcactgcaaccttcgcctcccaggttccactgattctcctgtctcagcctctcaagtagctgggattacaggcgcccactgatttttgtattttaatagagatggggtttcaccgtgttggtcaggttgatctcaagctcctggcctcaagtgatctgcctgcctcagcctcccaaaatgttgggtttataggcgtgagccacggtgcctgggcggcaaagtgtttttaaagagaaatacctttttagattccaaaaatatttactacttgaatgattattgacagtaaacagccatcatttacgtgaaaggtaaaacatgtgctttattttattttttaaaacatgttcttacgagacctcaaggctcaactgacacttttttaaaagagacagtagaaattgaagaaaacgataaaatttaagaagaacgatttctaaaacttatcccaaaatcattgaaagaagtacgttggtgttttcaactaagttattttgaagaattgagatcattctagacaatcacagtcttggccacatgagcagttaaaattaatacaacatggctatgataatgacattttattatattaattacagtgaaaatgtattgttcaagaaaatattttctctaggagaggtcaggtcattttgtaaaaaatgttcaagtttgtaatgagactacataacttcttatgtttgtttctttgggagtcgtaacaaaaccttaagaaatgagatcttcattacaaatagattcatatgtgctcataagaaatcaatttcctttatgcctttaacaactagcagatgagaataaaatggaataaaactatggttatgctttaaagtactggcaatagttttaacaaatgagacttcatttacgtcttcaatatatgtatattgttaatttattatctctaagtaacacagaaattcatgtgagtccagtgtagtgggagctgagacacagggagtataaactgaatccagacacttgcttcagtcaagtatttttagatagttgccttagtcacatgatccttgtctggacagtattaacttcctttgctgatatctattctaaatgatacattttgggaacataatcatgcctaacccagcagtgaaaccctatccaaacatatcagtttgaaaattggtaaggaagatgctggataataaaatgtagatatattttagttcctaatgagctaagttatgtttctggttgtgttttacaaattattcataattaccctttgggaattagtttacctaaactttaaagaacacacatttccaattatcaataaaatttaagtagcatagaaaaagattgtatatacatttttgaattgatccttccagaaatcttatgaagtagccgttcttatgtccatttggacagaaaacaattatggtatttagggaaactaagtaatgtatcaaggtcatgtatacagctgcttttttttttccttcttggccacataatgtcattttggagttgtgagccatggggtaacattgtcaggtttgtagcgtagattaatttttctggcagaaatgtgaatggtcaatttgtgagatccaagactggaagcagggtcatgtatcacccttagctcctatctttccatcatagcccatgtcccacacatcaggaaagctgttagctataatttgaacatgtatcaacaagtcaacttacttatgtaaggccactgcctgtatcttcctggcttcagcctgtcaactccttccttcatatacagtagcctcctaatttattcacaaaatgctccaaaatgaatatattaacttactaaccttacgactgtagcaaatactaacagttgagtaggaaatttacttaataggcagcttgaaagaaaattcaagtcaatgcagtacatttctgctgcaaatcatttctgttgcaaaattactccatttgattcttgtttttcagtggtcttgccagaacaaagttgctattctgggtttgttttttctcttttaaaataattttattcaatttatgaatttgtttcagtttttaatagaataccctgacaaacattgtatggaaattccaaactaaaactaaacaaacattgccgtgttttcaactgtttcttttttatactgctctgaagaagaaaacaattctccctgaacaaattcctattacaatgaaggcaaagatcatgttttaaaaatatttactgccactatttgaagaaaacttctaggattgttgttcgggctcatacatttttaaaaaaggaaagtgtaagagaaaaaaaaaaaaaaagcaaaggaaaggctggtcatggtggctcacgcctgcaatcccagcactttgggaggccaagatgggcagatcgctcgaggtcaggagtttgagaccagcctggccaacatggtgaaattccatctctactgaaaatataaaaattagctgggttttgtggtgggcatccataatccccgctacttgggaggctgaggcaggagaattgcttaaactcaggaggcagaggctgcagtgagctgagattgtgccattgcactccagcctgggcgacacagtgagactccatctgaggaaaaaaaagaaaaagaaaaaaggggaaacgaggaaagaaggaaaaagaagagaggaatgaatgaaaatggaaaatagaggacagggaaaaataaatgaaagcttaccttactacgcaagtgccctattttctacacataggaaagctaatgaattgttagtcttgttttttaaacttggaaaacttaagtcactttttttgtactgatattttcctgatttcaaaaaaagttacccaaattaagaagctaagaggaaaatgtatttccagttaactgaaatattaagttgagcaatcatttcatataggatctgcgttcatgtaagtgcatgtaaatgctctcagggtagatgtatgtttgggacctaataaagtttcctcctctggttttagaaacaggttaggatcacaaaatcatgatacaactaacaacttcaacaatcatcctcctttgtttggagcccattgcaaaacctcttcataaaattgaacccatacatatagtatgatgcttgcaaatctgaaaaatccctttttggacaaactaactcatcttgcaaaacttcctacctggagtttcctctcagtaatccttaacaggaccaaacatccctaattgtataaactaaagaaaattaagactagcaagacttcacattgaccccagaattatttctaaagttgccaaatacgtttttgtctttgtgtctgtagcaaatctcttactcttgggacctcattacctgagtcccaggacacctcaaacttctctgaaaagccaaattgccttaccatgggcctgtcgagaattcctgtccctcttcaatatttgtcttacctttgattcctgttttattcaactttaatgaatcctactgtctcttcatggacccactatccacacctgtggagtctgggaacgttcaatgtggtagaaaaatgtaaaatttttatttatataaaaacagaagacttgtaattcagcagctgtgcagtgtttttctagcaactgtgtgctcttttgcatttggtacagtataaacttctagtttgttctgctgtcatggaacatggtcccagtaaaccttcctgaggtcagcaacttggaccttctgctgtctaggtcccatgcttggcgtagtgtggataataatgttaaatattatatggttttggcttcactgagccatatcagaacattcacaaatagctgtcatacaaattcctgcttcttattgccccttttccactgtgcatagatgcaagaaaatagtttcatggccaggtgctctttgtttcagcttcctttgtttctcccaaggctgcatggcaaatgtatgatttgttcattcttttaaaaaaaattgagtgctaagtgccaggcattatgaatgtatgtatgcttggaagagggggagagcagtgttattatctaactcacattttgaaaagatcactctgattgctttgtagaaaatggtaaggggtgttgaggaggggtgctgatgtgtctggacaagtaaaaacattccctagttgtgattagttcaaaaggaagcttaatagtctaagaaataaatgtaaggtattagtttgaaaaaaggtcatgctgattaattgcatgtgcaaggggaggggaaaagagaggggagatttcttgatttatgggtaggtggccttgtgtttagttaggaacactgggagaggaatggctcatgggcagaatcatgagtttggaaatattatgtttgaggctcatttaagatacacaattggagatgtcaaacaggcaactgaatatatttaatatgagccttgatctggataattctttagaggagttaaacattggggtttttatagaatataaattgtatttaacctagtttttgaaagcatctaggatagaatacagattaggaagaggatgggttccaggactgagcccagagattcctcaggtaaagtaaagaaagagaaggtaggactaagagactgaggagtgaaccgtgaggttgctggaaaaccaggagactgtactgtttcagaagccaatagattcatgcattttaagaatgacagagtggccagttacattgaaggctgtttaaagtcgagaaggatgcttggaatgtgtccattagatttggcaacatggaaattgctggtaaccaaaatgccagagaaggtttatcagagtggctgctgctgttgaagccaaagtgggagtgatctgagttgctgatgggagtgtctgttgacctatcttttgagaagtttggctaagggcagcagagaaatagcatggttgatggaggggctacggggtaaaggaagttgctgtgccttaaaaatgacaccttagagctgggtgtgttggcatgcacctgcagcctcagctactccggaggctgaagtgggaggatcgcttgagcccaggagttcaagtccagcctgggtgctgtaaggatacctgactgaaaacacacacacacacacacacacacacacacacacacacacacacacagataccttagagcagcatttattaaaccgcagtttgtgaaccataagtggtcttaaaatatttttattgggttgcaataatcatttaaaacattaattggagtaaaagagaaaatagggtacatgccatgtggtaaaggtaagaattttatttttgtggactatattattatgaagaatttacaaatagttacatatctacacacatatactggtgtatattggattgtaatataaaatgtatttcttcacgtgaattacggttttaaaatttgaaggccatcaaactagggaatgtttgcatgctgatagggataatctagtagagagaaagaaactgatgacacaagagagtgggaaaaccaaaggtgtaaagtccttgagcagagtgaagaacttttcacacaatcttctctcttttctcatttatttaccatgtggcttccaggtagtcatcatcaatctaaccgtaactgaacaaatcccatgtttctgcaggtatgtgcggcagtgctgatgtttttgtcaacagcaatgatttgacatcagcactgggctttggtttaaattgtttcctctctcctttttctaaatgtgtatgttaaagttctaaccaccagtacctcgaagtatgactatatttggagataatgtctttaaagaggtaattatattaaaatgaggacgttaaggtgggccctaatccagtatgatcagagcctgtatgagaagtctggacacaggcaggcacagaagaaagaccatgggaagacgctgggagatgatggacgtctgtgagccaaggagtcttcagaagaaactggctctgcttacaacttgatcttggacttctagcctccaacattgttgagaaaatgaattgcagttgtttaagccactaagtctgtggtgttttcttacggcagccctagcaaatgagtacatactgtcatgcttgttatttgatttggcctttgattgttacaacagcctgaggtgtggaggaccagaattataaatgccagtttacagatgagaacactgagatgaagagataaatgactgaccgaaggtcagggatcaaaatagctagtaagtgatacacaaagtgttgtagatcttttccaagtgttgtttccttggcaaaagccttggtggcaggccctgtagtcatggcctgcctgtagtggtagatatgactctatgctggtccattaattagtgccaaaagctacatttctctgcaaatatagattctagtgtgttctgaaataagacttacaacacttaaaaacttaaggatgcctagtgatgaaatatattaacattttttaaccatcacttttatgtagcccatgaaattatacagctcaataaacatttgaaagtttagtctctcaatgagaagtgataaaatttgacccgtgcatgaaaagaagacagctgattctttaaagcctttttgaagagctatgacatttctgtaaacatgcaccaaggaatatctgaataaagcaataatcgatcaactaacattgtgttggtttcctgatacaaacacctgaagtgaatgataccagtaaagttaccatccttttttctgcaatgctttttaggtcattttaattttaagctacatgctcttaacttgaattttaaacttcttaatggaatgtacttacaatgaataaatgctctgagtgacacttagagtttgcaacacgtttagcatgttgtgctgattcactaacgtacgctttctttcagattacttttactaagtaaaagtagtctacccttacactggtgaataagacaatatttcaaaaaattcctaaggtaacatagaggaaatgtgtattttgtgtgtgtgtgtgtgtgtgtgtgtgaatcacctttcagtataatgagaaattttatttcaccttatgaaaacacatgagtttttttagcatacaaacttaaagatcaaatttttaggttgtacgttgtgtctgtcttcagctgtgtaatgctaaatagatcttcaggttaccatcttatctattatgcatttgattctgttttcccacattctaaaatcagtcagattattgatttttacaatctaaagaggataatatgttagctgattattttcataatttgtgatttcctgattattagtgagattattagtgagacaaagagatctttgacatatttattggccatttgagtgtcttatgtcaactgtctattcatataactagcctgtttttctatttatttttattttcttacaattgaatttatccgttccttttgcatgttgtatgatactccattttacctgtgagatttgtaactatcttcttccaacctgtggctttctttttactttgcttataatgtattttatcttataaaaggtttcagtattaatatgttcaaatatgtttatttttcttttatgcttttttcttttctgtttctatctttatatcatcaatatagtctctacgtaataatttgaaagttaaatatttgtttacctgatttaagttattaatcccatcagaagttactttttttgtttttgtttgtagataaggagttatctgattttttttctttctctgtatggttagccggttatttctgcaccatgtattggatagtctatcttttgctcagacatttgtcataggctgtatcctaagctctcattggtacctgagtttattttaaggtcatttattctgtcacttttgttcctgtgtctattccttaaactatatacactgtttaatttctgaagctttttagtaaaggcttatatcaattaagctaagttctctattcattcacagcaaaatttccttgacagatactgatctgtaacttttccatgtatattttagcaaaaaattgccatcttccttgaaaacactaataggatttggttagaattgctttgattttatatatttatttgtaagaattgccttaaggacatttgggcatatgagcatgatatatagctcgtttgcttatgtctttttatggcattcaatagaattattattttaatctaaaagtcttacctacatgtttactattaatagatttagttataactgtcattgtgctattataaaagtaactctttaaaatcaaattttcttttttcttttcttttttttttttttttgagacagagtcttgcactgtcgcccaggttggagtgcagtggtgtgatcttggctcactgcaacctccacctcccaggttcaggtgattctcctgcctcagcctcccaagtagctgggactacaggcgcacgccaccatgcccagctaatttttatatttttagtagagacggggtttcacaatgttggccagatggtttcgatctcttgactttgtgatctgcatgcctcggcctcccaaagtgctgggattacaggcgtgagccatcagtgcccggcctaaaatcaaattttctaacagtttgctgcagatgtgaaggaatattacatggatatatttagtatatagaaatcttgctgaataattttatccattataatcatttatttattgattttcttagattatgtgggtaaatgtggataaattatataattcttaattcttttaatccttctacattttatttttgtgctattttactgtagtagatattttcaatacaatgaagactagaagttttaaaaccaggatagcaacctcatgggcctatttatgaaacaatacctatttatatgctacaactttttcacctgttatcgtgaatgacaattgacatctaacaatgggaaccataaacactgttgagctctaaatgctttcccagtgcattaaaaaaattaaattgactttctttttcattctttttctctacctctctcagaaacaacttctattatttactcattattatcttattccctaatttttttattttattcaacagatacttactgattgctcaccaatttgccaggcacagctggttttggggggcattccatgatgaataaaagtagcaagatcccatttctcatgaggcttctggattaacaagggagacatgcattatatagaaaattacataatggttatttccttacaatccgatggttactctgaagcacaagtgtagcatgctgtcagagtgcttagaagatcgggagggaatagtgctaatacatagtttggaaggtcagggaaagacatctgaacttgaccacactattgagtatgagttcgacaggcaaagatgggaccttgagcatgtagaatactccagtgacaagagtagatgtaaacaaaatagctctaaaaatagtgttcagtgaaaagtgatttgctataaatattacataggtgtgctaaatagaaaaatagaaaaatgattgaggacagcaaatatctgttgaatgtccctatttggaaggtatttaatatatcactctgaattgttctctggttaattaggaaaagtaagtttaaccaaggggagggcaatggatgttggtacagagctattcaagatcatggctacctgtgtacttgcctcatgcaagacctgtcacccattggaacttccatcattttttctctggatccatttctggtagtctctttattttgatctctatttttccttggtacccatgaggaacacaatttgaataaaagaaaaaaatgtattcataatttagaaaatgattttattggacccactaacatcaccaggaagaatgcaatgcaatattggcggtgggcattttggttaagactgggttggtcattttaatacaccctttcagccagtattcagagcaaggcatgtgcttgcctagacttcacattttagaaaagccagggcctatatatggagagttcttttttgtcagtctcatgaaatgaagtgctgcagtttgcatttttcctattcagtttcaagtatgaacttgattttaaaatttaactacagtttcgttaagatgtactacaactcccagctaattatgtagatgtatcaaatatgtattttatttaaaagccgtattactattttgcttttatccatcaatgattcttggataaaaggtggtaataaaatgttaatgtgtatttagtcatatgcaaaaaagtactatagaaatttctgaggtgtacaatgacatgcattattgcttccataagcgtaagaaaactcagaatgacaagtctacacaagctaggtttcttgttcatccaggggtggcttgctttgtaaccttttcctgaatagtagactaggtactgtcttccttttatttcccctataaattagttgcagtgttcttggggtccttagggacttcaggtggttgagcctttcaccaagcatacatacctagtctgtgaacagaagtctaggactctggaaagcactgagggcagagatgcttccagtcctgtccttacacgacttcccctgccaacctcctctcttccctcaggtatttttcttagtgcgttaaagatatttccttttacactaaaggaagtccagtgaaggttgcacagtgtgcagtggtgcacaaaaacaaaaacacaaaaaagggatgcatgcactctcaatagaattttacatggaaattgggagaagaggactccatctttctaggggacaataatggacactggccaaaagcagctgagtgagagctgagaccaaatccctgggatcagacctttcagccccagccatgcctcctttgggcatttgccttgtggaagactgacagctcctcagtcagtatagagggccagagacacagcgcagtatagaagcacatgtattatgacctggtcatgccaccaatatgtgagctgtgcttttctttgacatttttcattactcagtgaaagaagtagaagccatgcttgtcttttctctgccctggagaagtggagataacaagggctcagcctcatgagatctgagatgtagggcagactgtgtccacaatgcagaacttcagtgaataattaaaaatgagggcactttctaatggtctaattgagcacacggtgaaggaatttccaataagttatgtttaaccatcaagtgacattataagaagaaagaatttcatctttattttataggtgagaaagctgagccttggagtgggtaagccattggccaaggtcataaacaagtgtgtccaattccaaacctaagctcataatgagtacactgtgctgttgtaaaaggggccgtctctccctctttcagtcttaatgggagaaatatttaaaggcatctttgtgagaaagttttctgcaaaatataatgtggtttgaaaaatatgagttactgtgttaggttcagattgttaagactttcttttaatgtagaaggtgtagtgtctataaccattaatttgtgttgcaccctcccttttgtgaagcttattaataaaacagtctgctactccatcctccaattcctgtacttccagtgttcaagtctgctgatcatctactgcctaaaaagttttcccataaacaggaaaggttccagaagtgactttatcaacaaaaacgctgcttcttgctgctacaatttcctgaattacaaggcacagatggacattaattggagcgggtgttttgagagccagcactacctgcctcacactgctgagggatatagaggtctctattcctttctaagcacaggactcaggaagtattctggaagcagctcagaaactcagggtcctgcagggatgtgcctcttttggaagggcaagaaacctcactgatgaacagaagcccctcaacttcagattgcaacctcttcttgtgacacatgagacgcttcttaagatttcaaaacaaaacttggtttccagagggcagctagtgagctcatcctgtttggagacccaggctgtgtcttatctgtgtcaaataggtaatattttgacagaagtgtttccaactagcccacctcatacatagaatattgtactgcattggtctgttgtcatgctgctaatatagacatacctgagactgggttatttataaaggaaagagttttaatggactcacagttccacatagctggggaggcctcacaatcatggtggaatgaaaggagaagcaagccacgtcttaaatgataacaggcaagagagcttgtttaggggaacttccatttatagaagcatcacatctcatgagacttattcactattacaagaacagtatgaggacacccacgcagcgattaagttatctccatctggccccacccttgacaaatgggattattacaattcaaggtgatatttgggtggggacacagagccaaccatatcattccacccccggcccctctcaaatctcatgtcctcacatttgaaaacacaatcatgcccttccaacagtctcccaaagtcttaacttattccagccttaatccaaaagtccaacagtccaaagtctcatttgagacaaggtaagtcccttccacctatgagcctgtaaaatcaaaagcaagttagttacttcctagaaacaatggtggtgcaggcattgagtaaatgcccccattccaaatgggagaaattggccaaaacatagagactacagtccccatgcaagtctgaaatccagcggggtagtcaaattttagagctccaaaatgatctcctttgactccatgtctcacatccaagtcatgctgacggaagagatgggttgccgtggtcttgggcgtctccacccctgtggctttgcagcatttatccacctttccagctgctttcagaggctggtgttgagtgtctgtgtcttttccagatgcacagtgcaagctgtcggtggatctatccttctgggttctggaggatggtggccctattctcatggctccactaggcaatgccccagtggggactctgtgtgggggctccaactccacatttcacttcccacactgccctagcagaggttctccgtgagggcctcgcccctgcagcaaacttctgcctggatatccaggtatttccatacatcttctgaaatctaggtggaggttcccaaacctcagttctttacttctgtgtacccacatgctcaacatcacgtggaagctgccatggcttgggatttgcaccctctgaagccatggcctgagttgtaccttggccccttttagccatggctggagtggctgggatgcaggacaccaagtccctaggctacaaagagcagggggaccctggtcccagcccatgaaaccattttttctgcctagggctctaggcctatgaagggaggagctgctgtgaagacctctgacatgccatggagacattttacccattgtcttgacaattaacatttggctcctcattatttatgcagatttctcagctggcttgaatttctcctcagaaaatgggtttttcttttctatcacattgtcaggcagcaaattttccaaatttttatgctctacttcccttttaaacataagttccaactccaaaccatatctttgtgaatacataaaactgaatgcatttgacagcactgaagtcacctcttgaatgctttcctgcttagaaatttcttccaccagataccctaaattatatctttcaagttcaaagttccagagatctctagggcaggggcaaaatgtgaccagtctgtttgttaaagcataaaaagagtcacctttgctccaattaccaaaaagtttcttatcttcatctgagaccacctcaacttaagcttcattgtccataccactgtcagcattttggtcaaaactattcaacaaatctctaggaagttttaaaccttcccacatttttctgtcttcttctgagccaactaaactgttccaaactctgcctgttacccagttccaatgtcacttccacatttttgggtatctttatagctgcaccccactctaccagtaccaatttaatgtattagtttgttctcatgctactaataaagacttaaccaagactgggtaatttataaaggaaattggtttaatggactcacagttcctcatggcttgggaggcctcacaagcatggcagaaggcaaggaggagcaatcacatcttacatggcaacaggcaagagagcttgtgcaggggaactctcatttataaaaccatcagattttgtgagatttattgactatcaggagaacagtatgggggaaaccactcccatgattcaattatctccacctcgccttgcccttgacacatggggattattacaattcaaagtgagatttgggtgaagacactgagccaaaccatatcataaacttatatggcatatgatgggaaacttttatttttccatcacaagtagagtggtaatatatacaaagagaaaatgggtatcaggtattggcaatttttattttcattgttcatttacatatgaatttttagtataaatttggagactttaagtattcatgtcagaaaaaaatatttcagtgaataagtttcagaaattcaacgtcgtatgttttttttcttttgcaaggtcagactgtagattcctttaaaaaaggactttttattgatagaaaatgtgtttatagaattttaaaatagtatattctgttcattatctctaattttctcactctgctatactacatgcaattatatgtctaatgttatttatgtttatttatataaatttgctgttaaaatatattcaattccctattcctctaaaaagaacaaaaataatgacaatttattcgtattttttttcttggctatgaactcaaatagatgaaatgttatataaattaacaaactttaatagcacgtattggtgatgtgcaagtcaatagttctcaggcatttaccttcctagcactttcctatttgctgagagtagaagcgtttgggagaaatatacaggatagtacatgcttttcaggaactcacacctagctggaagggcatacctaccacagtggaaacagtcagagaaaaatccatcttggaatgtgggaaaatgattgtagctcttgaggaatttagaaagggagagatctttaggggctgggaaatgacaagttactaatatgtagactgggcagttcctctgtgctacttccataagcaagtgctttatactcacactgttgcatgtaaactcctcaacatttctgtgatagaggtactgtgagatgttcctttcacagaagaaactgaggccaaaaaagtaatgtgacttacccaaggtcccacctgtcataagtggcaggctcaggcctcatttacatggaattggtgtttttaaccatctctgttctctttgcagtggttgtaagtgcctcggcaataaaatagctaaacaccatcacagagtgtatagagttctcatgggctaggcattgtttcaagtgtcttttcttgtgttatctcacttcatcctcatataagccctatggatcacagagaattatgtgccttgcctaaatctgtcatgcaagcaagaaagatttgtgttggaattgaagaacgggcatgatgttgatgaacatttgggatgaggcacaagtgtttgaatgggctgatctctctgaaactggcagaggcagggtgaaggtgctggcttcaggcaggaaggaggccagactgtagggcagattctcatttttgaactaaaggcatgcagtaggaaacctgagatttattcagaggagcctagaaataacaggctagaaagaggaagggaggaatggagagcccttagacaattgaaagactaaattggccagcaaggaacagagatttcccattctacaatgggaaagaaagatgtggtctaaggtctgtgttaatgaagaaatgctggattctgcagtaagctttctgggagtctccactccataagcgggaaatgtaggaatttgtatgctttaatcaagtatatttctcaagaccacatcagaagtttttcttttgtagagtctgcattgaaatcatcatatagtttaagaaactcacttcgaggtagggacaacaatgttgtagttagcattgacttaaaatgtgagaagcgcaaatgtaaaaattcttacttgggttctctaaaaaagaaagtatgataattgattaatgtatgagcagatgaaccttcaccagattttgaaagcaaacctttggaacatgtaatgtatttgaagatacttttctagattttcccacaaaggatcttagtgaactgatcattcatacttcaaaatagaatttgagaataatactgtttgcaatcaaagttgggaacaaatctcatcaatatgattgggctttgtgtccccacccaaatctcatcctgaattgtaatccccataatccctataatcccaacgtgtgaagggagagatcaagtggaggtggttgaatcatgggggtggtttcccccatgctgttcttgtgacatatggtgaattctcatgagatctgatggttttataaggggctctttcctttttgctcggcacttctcctttctgccaccttggaagaaggtgacttaattgacatgtgagtcaattaaacctctttcctttataaattaccgcatctcgggcagttctttatagcagtatgaaaatgggctaatacatctgtcttcactatttactagttataaggctagtaaatagccatatgactgtatggcataatttaatttctctaaaccttagttttcttatctgtgaaatgggttaataatacctacatcatagaagttatagtgtattaaaaatagcacatgtaaaatgatgaacatgaagccaggcacatgtaagcaatctattaacattatcatcattttcattgatgttccctatagagacagtcatctgtggatttgatgcaggcaaactagatacctttaataaaaatatgaggtagttagcaactgcaaaggaaccttcttattcagagctattgttactgtcagcagtgttaatatattaattttgcttggtcattgactcagtgtataaaatatgtgggcagtgaactgaggaagcttagggaccagtgtgaaaaagacatataaatcatattaatgcagtagaagtgttataatcaagtgtatttttaatggaagcccatagaatgtgcttttactgtatggttagctgagtggttagccgattggagaagtgggcaggaaagtgacatttgagtctagatggatgagtaagagtctacttgaaagatgagagtccaaggaggttgcaaacagaaccctctctgccaccagaagcatgaaggtacaaagaaaatggcaggcagtaagcatgcgagatgttaactatggaaagagtgtggagtacaagacgagagaggcatgagctaaggctcaatgaggaagggcatcatttgttatatttcacatttatttgccataaaataggcttaggacaggtgtcttgatcgttaagtgcaaaagtcacatgatcaaatttatgtttcagcaagatgatcagagatgatgcaaatgaaaaattacagggagagaaactgaaaaaatattgttatgttttaagtgaaaagtaatgaggtctgcgactaggcaaagacatggaagataaatggttgggaattcaggtggaagacttttgggaactgcaagccattgaattgtttactgaatgtgggaatttaatagcaagtgaattatatgtccacatttgaccaataaaacaatagtgacatccttagaatcaagcaggaaatgcaaaatgaaaagcaggatttctttgagcatgtaagggaatttaattctcaataatttattgatttatttttattttttatactttaagttctagggtacatgtgcacaacgtgcacgtttgttacatgtgtatacatgtgccatgttggtgtgctgcatccattaactcgtaatttacattaggtatatctcctaatgctatccctctcccctctccccaccccacaacaggccccggtgtgtgatgttccccttcctgtgtccaagtgttctcattgttcaattcccacctgtgagtgagaacacgtggtgttcggttttttgtccttgggatagtttgctgagaatgacggtttccagcttcatccatgtccctacaaaggacatgaactcatcctttttaatggtggcatagtattccatggtgtatatgtgccacattttcttaatccatccagtctatcattgttggacatttgggttggttccaagtcgttgctattttgagtagtgccgcaataaacatacgtgtgcatgtgtctttatagcagcatgatttatagtcctttgggtatatacccagtaatgggatggctgggtcaaatagtatttctagttctagatccctgaggaatcaccacactgacttccacaatggttgaactagtttacagtcccaccaacagtgtaaaagtgttcctatttctccacatcctctccagcacctgttgtttcctgactttttaatgatcgccattctaactggtgtgagatggtatctcattgtggttttgatttgcatttctctgatggccagtgatgatgagcatcttttcatgtgtctgttggctgcataaatgtcttcttttgagaagtgtctgttcatatccttcgcccacttgttgatggggttgtttgtttttttcttgtaaatttgtttgagttctttgtagattctggatattagccctttgtcagatgagtagattgcaaaaattttctcccattctgtaggttgcctgttcactctgatggcagtttcttttgctgtgcagaagctctttagtttaattagatcccatttgtcaattgtggctttttttgccatagcttttggtgttttagacgtgaatttcttgcccatgcttatgtcttgaattgcctaggctttcttctagggtttttatggttttaggtctaatgttgaagtctttaatccatcttgaattaatttttgtgtaaggtgtaaggaagggatccagtttccgctttctacctatggctagccagatttcccagcaccatttattaaatagggaatcctttccccattgcttgtttttgtcaggtttgtcaaagatcagatggttgcagatgtgtggtattgtttctgagggctctattctgttccattggtctacatctctcttttggtaccagtaccatgctgttttggttactatagccttgtagtatagtttgaagtcaggtagtgtgatgcctccagctttgttcttttggcttaggattgacttggcgatgcgtgctcttttttggttccatatgaactttaaagtagttttttccaattctgtgaagaaagtcattggtagcttgatggggatggcatcgaatctataaattaccttgggcagcatggccattttcatgatattgattcttcctatccatgagcatggaatgttcttccatttgtttgtatcctcttttatttcgttgagcagtggtttgtagttctccttgaagaggtccttcacatcccttgtaagttggatccctaggtattgtattctctttgaagcaattgtgaatgggagttcactcatgatttggctctctatttgtctgttattggtgtataagaatgcttgtgatttttgcacattgattttgtatcctgagactttgctgaagttgcttatcagcttaaggagattttgggctgagacgatggggttttctagatatacaatcatgtcatctgcaaacagggacaatttgacttcctcttttcctaatcgaatacactttttttctttctcctgtcttattgccctggccagaacttccaacactatattgaataggagtggtgagagaaggcatccctgtcttgtgccagttttcaaagggaatgcttccagtttttgcccattgaggatgatattggctgtgggtttgtcataaatagctcttattattttgagatatgtcccatcaatacctaatttattgagagtttttagcatgaagggctgttgaattttgtcagaggccttttctgcatctattgagataatcatgtggtttttgtctttggttctgtttatatactggattacgtttattaatttgtgtatgttgaaccagccttgcatcccagggatgaagcccacttgatcatggtggataagctttttgatgtgctgctggattcagtttgccagtattttattgaggatttttgcatcaatgttcatctgggattatgatctaaaattctgttttgtttgttgtgtctctgccaggctttggtatcaggatgatgctggcctcataaaatgagttagggaggattccctctttttctattgattggaatagtttcagaaggaatggtaccagctcctccttgtacctctggtagaattcggctgtgaatccatctggtcctggaatttttttggttggtaagctattaattattgcctcaatttcagggcctgttattggtttattaagagattcagcttcttcctggtttagtcttgggagggtgtatgtgtcgaggaatttatccatttcttctagattttctagtttatttgcgtagaggtgtttatagtattctctgatggtagtttgtatttctgtgggatcggtggtgatatctcctttatcattttttattgtgtctatttgattcttctctctttttttctttattagtcttgctagcggtctatcaattttgttgatcttttcaaaaaaccagctccttgattcattgattttttgaagggttttttgtgtctccatttcctttagttctgctctgatcttagtaatttcttgccatctgctagcttttgaatgtgtttgctcttgcttctctagttcttttaattgtgatgttagggtgtcagttttagatctttcctgttttctcttgtgggcatttactgctataaatttctaaaggctttcaaagtaaaaaatttgaattatagcacaaatgtgtcattttagaaaatgccaggtttataggaaaaagttataaattgtaaattgtgattttatcttactgtgtcaatcagaacagagccaaagatgtggcttgcaatttactttaagaaaagaaatcacatatttgtagaatattttgtaattttcacttctcctttccataaactgccttgtttaattccttgaagagtctcactattctttcctttatgagggttctacaaatgtcccttaagcaaacactaggtataaggaactgtcctaggttccggaaacacctcactctcacagaggatacattctagggatagaataggggagttataagtatctagaatagaaagtcttaacttgggccctgagtagtatttggggatagtgaggtatacacgatctcaataaaatttacgtaaaatagttctaagaagagacttttaccagatttcaaagactttcataatcctaaactggttaagaatcatggttttcaaagctgagcctcaaagaagttagctgacttgctcaagttcccaagaatcaagttacaatttggatcttaatgtactgtgcagtgccattcaacccctcattgctaattgtcttgccatctttatctccaaagaatggtcaattttcctgagttctaatacattcctcagtttacttattataaatgtcacttccaatccggttgcagcaattaataattttgtaatatagctggatcgactttaatttcttttggctttaagtgcagagacatccaatcctgctagttccaaaggtgttttctgaaggcagtgttcccaaatcactgttggaaaggaatatggcaaggctcctgaagaaattccggtggaatttctttaatcatctggtggaagtggagatgtgtgtggttcctaagaatattgtgagtcctatatttaggacacagaccaatgcctttgaaatggccttcttggcttcctgcagtgtggagctgtgatctccatggtgagatatcccttatatttacacactgccacctgacctttgggtcagggcatttccaatcgatttaggagtgcagcaagtgcaacgacggtgttgatgagctcttacagcatggtaagcaaggctgcctgggactgaggggcgtgggaactctattgatttttaggtactttttatcacatactcctacactgctggactttgaattaagttagttttcagacaacataccagagggcaagaaaacaaaaagtgggatttttacacataccctggaaacaagttaatttttcctggggaaatcaagtagagagctggttaccatcttagcaattaacagaagttagacaaaatgtttaacaggaattggctttgtggattatggcattgggttaccagaacagcaatcaaaatgcacctcagtagtctcagtttgttagaactgtgtctcacttcaaatataactttgctctggaagaatagagagtctcaaattcacttgtgggatcctcaagaattttgcttctctgattgccaagcattgaagcaataatttgttattgaattgaagcaagacaacaggaagataattttatatcagcctgatggcgttgtttactgaaactctaataagcttttgggcatgtagtatgtgtgtgtgtgtgtgtgtgtgtgtgtgtgtgtgtgtgtgtgtgtgtgtcttgatttagggttaagtcttcctgatttgaaggaataattttaaataatattgtcagcatggccctgtgattcaacatctgttgctgtgttttttcctaaattccagtcttttgtatacacttagaaatttggatgatttacattggatgcttttttttttctgctcacttttaatctttacagtattttctgaaaggcagcatcaaattctgaatgggcatcactgattcatttacacatctgttaaaattttattgagcacatactatgtgtggtgtaatgcactactttccaatgataaggaatttagataagcaaaatgtgcttcaggtcgtcaggccacggtgattataatttggagagactgtaggtaggcaactcattacaaatgaagcagaatgaaactatcactaaattgagtaggcaggaatagcttactctggcagaaggcacctgagaatcctaattgagggaagacttttaggttttaagtaagcaaatccaccactgggagaatgacaaaccctgtcagtcacatgcctttattatcatggctctgctttcagtacctcccggttgtgatatctgtactcttctctctgctcatccaaaaagtctgcattatttcatgttaagagaatagtttgatatttactattggccaaagcaagaaaggctttgcctactccatgctatagcttagtatttgtggtgtttcttcattattggtgtacttctctacaggatttctttatgatggtttctgtctttagatactgacctaaattattacttgccctggccttttggggaagaaagtcataaaatcaactatgccttagatctgcattgtcaaatcggaagctatcaaccactgtggtcaatgagcacttgaaatttactagtcccatttgcaacatgctgtaagtggaaaaaacacactgagtttcaaagacctggtatggaaaaaaatgtaaaattttatttttatttttatagtgaatacaggttgaaatgctgagaactttatacatatatctatttaactatacatatatttaactaatcaattttgatttattatatataaaaattatatatatatttatggggtacatgtgatattttgaaagatacaatgtgtaatgatcaaattagggtaattaggatattcatcacctcagatatttattctttctttgggttgggaacattccttatgttctcttccagctatttcaaaatataggttaaatttattcataagttttttttttgttatcccttataaatgtgattgctctcttgatttcttttagagattctctgctgttggtgtattgacctgatactgatttttgcatgttgattttgcatcctgccattttactgaattcatttatcagttctgctagtttttttggtggagtctttaagtttgtctaaatataatatcatgtgtgaacaaggataatttcatttcttttttcacaatttgggtgtcctttatttctttcccttgcccaattgtgctggctggaacttctggtgctatgttgaataaaagtggtgatggcaggtatccttgtcttgttccagatcttataggaaaggcttgcaatttttccctattcagtaagatgttaactatgggatttttataagtggtctttattattttgagatatgtttcttctgtacacaatttgttgagagttttcatcataaatggatgttgaatgtaatggaatgctttttcagcagctatgatcatatggcttttgttcttgattctgttaatgtcatgtatcatgtttattaatttacttaggttgaaccatccttgtatccctaggataaatcccatttgattatggcaagtcaatttttttaacgtgttattgaacttgcatgatggaattttgttgaggatttttgcatccatgtccatcaggagtattggcttgtagtttccttcttttgttgtgtctgtgtctggttttggtatcagggtaatgatgggcccatagaatgagtttgaaagttccccttctcttcaactttttggaatagtttaagtagaattgttattgcttcttctttaaatgttttgtggaattcagcagtgaatctatcaggtcttgggcttttctttgatgtgagacttttaattgtagcttcactctcattacttattattggcttgttgaggttttctatttcttcattgttcaatcttggtaggttgtatgtgtgcaggaatttatccacatttttttaggtttttcaatttgttggcttatggttgttcagaatatcctctagtgagtctctgaatttctgtggtatcagttttagtatctccccttttcctctggtttcattgaattgagtcttgttttcttaattcgtgtagctaagggtttgttgattttgttcatctttgcaaaataacaagttgtatttgttgatcttttgttatttttgtatccttaatttcattttttctgctctgatctttattatttcttttcttctactaattttggaaaacctttatacagtgggttaaagaaaatatcttattaataattaatattaatttcacctgtttctttttcctttatttcacatggctaccagaaaatttaaaagtttacatgtggttttcattatatttctgttaaacagtgctgcctaagatagtgcttatggaactgttgtcacaaaacttatgtataagtgggttaaccgagataataaagctgaattcaaggtgtgtagaatgagcactagactgagatccagggactgattcagtcccagctaggacttggtctcctcaggtagccattcactctacgtgtctggaatggagtgcactcactgaaaaaatgcggaaaagattgagaagtagatcatttctaacccccttcctacattaaattcagtgattcaactgtgttcaggagtatacgattgaatcatacttgtagccctcccagtatcttctcaaagccttttagacaaaaccgtcttcctcattccacatcataatttatttgagaggttaaatttgtaattactgtaatttggagcttccttgatcagcctgaggctggagcacagcatccttcaatctgttcagtgctaagtgaatcagttgaacatgttgtgatttataaggatctgataaatatgttttgcaagaaagtttccagcactctttgaaaaaatttagagtgttctgaaagtaaactgtagtttttatgtcatttcaaataattaagaagaaattgtttcttattttttaaattaatattgaaaaatctatttctaacttaaattcacaggtaaaaaatgtggaatacttcatatatttcttataatattaaatatcttattaatattttatatcttacactttgatataaagaaatataagaaatatatataagaaatactctagccatatctgacttttttccatgtacgtatatttgaatataatatagattgtagtgtatatgttttagttttttaaaaaagttttaacatgtgttctactttggaacatgagtaatttataatattttttcttataaataatagtatgtttacatgtgcatatgcctgagataattagtttaggatcatttcttaatagagaaatgctggtcaaaggacataaatattttaagattttttcatatttataataaactttccttccaggaagtttgtattttccatttgtgtttcccttagcagggactgcctgttccctgcaaccttaccaatactaaaattaagattttaagttttgttttggttgacgagtgagaaaacatactttatttttgttggaatttatatttcttaggttactaagagaatccaaaattatttaatgagcatattggcaacttctaattcttctttgtaaatagcttgttttgggtttatatcgtctatttacttacttattttggatagttttttgttttgttttgttttgatagctgagctggtgagattatatagcacccttgaaaactttcctctttgctctgacttccaatcctgttcagtcatagacagccctgcccctgctccatccacatgtcacctgagcaaacaagcatatacaacagggggaaatcactgtagtcctcatcttggcatgtgggttccagaaaataatcaagcccttataagaggaagaagataatttaactcccatttggtccttatattggagtcttttagagcaattttttctagtttttcctttccaaagcaaatgaaaagaccccataacaatactagctttaagatctctgctgtaaacaaggattctgagtcaattgggataccacaggttagttacgtgtacactggtgtatccccttgcaaaatcacctgccttgagctgtcattacagaaccattataagaaagggccatataaaatataaaatattttaataaattggttgtgaaaatattgttatggacactgttttgtataacactgacattccaatacacaaaggatgcattataaaagatggagtgctagaaaaagctaaagtgctcttcaggtttatcttgcttctgatacgtgttactgatgatgtttcgggaattgcttgtctgcttggaaactcagagccaaatttgattcttaatcacagcaataatattggctgttagtattgactattttggtaatgtatttttatgctccaatttatatattacctataatttctgatttcattatttggtaaatttttttgtgtggatttttgtgtgggtgtgtttgaattttgtctgtctgtttgtctgtttgtttgtttgtttgtctgaaggtttttggaaaccttcttatttctgaaaaagagcaaggcctgtgattaagaagagtttttgcaagttcagtgaatactgtcatcattttcataataactttaaggtttattacagaaaactagaatagatttttgcctcttcctaggcaaaaaaagctgttgttcccaagcagaaaggtgaaagtcatcttgtattatttcttggcttttcatttttatatatgtttgcttgccttaatgataataatgctctaatctaattatcaatcacctgtttaatgctattatttctgttaattcatgggggcagctaatgattttaaataaggtagttttcacaagaataagtgaacaacatgaaactttttgtcaaatcaattttctaggcatcctttattttctgggcatcctttgggtttattcagtagaatagtctttggaaaatttgtaaatcatgcaataattgaaataaccaaaatactgtctccttatacacattttacataggaatatgctttagaaaactaagcaaagtataagtaaagggaatattacagaaaggtaaatgtcagtgttcttctattcaaattatgggctttaatttccccagccttttggtggtaagtgaagccatccttgtcttgaaaactgtagggggaactgtttacatggcctactttagacccttatgttattctgagtttttttcttctccagggaaataatttttaactatgtttgaaagaatgaatttaaggcttattaactgaactcgtcttcaaaaatttagaaacgatggttctgtcaaatcagataattttcttcctgtgcattaaagcataatatgaggaaactattagctacaaagcacatttaaatgctgcttggatattggtgtgcccttgctcattttcttgagtgtttctcaattcaaaactcaaaattaactgcatacttggcatcaggtcttgccatcaggttgaacctgagctgatgtcaatgacacactgctttggagcccatgggtaggtgaggggattgcagtctctcttcagtgtgggattctgaaaagaggcaaactgatagaggctccaaccaaataactgtacccacacattgagggactgaaggtaaactcccagagaagagacaaagacaggaggtggagagcagaatagtcaggaaacaagttagtcacagactttactcagatccgggttgtgcaagcaatgcagacttgactcttttgtcccatccactactcactgcccactgcactctttttggctgggttgtattattaactgctgggaatatttttctcaacttccattagagtggggattctcatatgagtagtagtaagtagaatagtaggaagtaagtaagaagagtagtaagtgaaattctgaagtactacctcttcctgcttttttctactggccttaaacatggatgcaatgtctggaactgcaatgattatcttgtaaacatgaacaagagatgacaccatgcctaggaaacactgaatttctgcctgcttccagacttctggtcataggaggaaaaaacaaaacaaaacaaaacaaaaacccccattagaagtcaaaatttctgctacttgagttcaaatgcattcctaacttatatactttgttgcctcgtttgttgccttctgctcttcaatagtctcactctcattggggaagaaaaatatataaacttaaagttcttattgcgacacttcttaatacctaaaattgccatcctgttgagccaggatgatcctcacatatgaggtacttagtagttgcttgttgaatggatgtgaaaaatattcctgtttttcactttggccaaattgaatgatagaaacgctttgggcttctctgacctggcagttccacagtgcaaagcaacattctgccctcagatcagcacacatctttacttatacaaaccctcactctggggtgcttattgttatagaaatctgcttctgtttttggcttccctgatggaaggaaaaggatgcctcagttcctggatgtattgtatgaaccttggctatacttacataaagcacaaaataactaagaaatatgctcaccccgtaaggatttatgtggagctcactcacaaatactttcataactgctgagaatcagcacggtttggtgcgatgttgaaaagtcatcagaatcaaaaaactatgtgtccaggtgcggtggctcacacctgtaatcctagcactttgggaggctgaggcagatggatcacctgaggtcaggagtttgagaccagactggccaacatggtaaaaccccgtttttactaaaaatagaaaaattagccaggcatggtcgtgggcgcttgtaatcccagctgctcgggaggctgaggcaggagaattgctttaacctgggaggtggaggttgcagtgatcagagatcgcatcactgcattccagcctgggcaacagagagagactgcatctcaaaataaaaaaaagaatcaaataaactctgatacccatcgttaccaccattggctgtgtgctgtggagaaatttagttaacttttctctgaagaagtattccttcctttgtaaaaatagacataaatatgccagtttcccaaagtgaatgggattaaattaaatcatgtatacatatataaagtgtttggcatgtagtaagggattaataagtgatacctgttatattaatggttgtggttatcttgcaatatgatagttgaaagatgtgctgattcaaagctgtcaacccaacatcttcctgggatctcacctgccttgctgtattatctgctggcgtctccaagggtgaccagcttgaacgatttcattatgtgtcactactacaacattttacacaaatacaattaaacaagttcgtcttccagcacactagttgggagttaaaaacagtttctattgatttatatttttgatggacttcattgagaatgttctgatttgtgggttaatgctttcttacattgagggttcccaggagccctgcagtgaagatggtaacctttacctaaactcaccagaatgattaattaatgtttacctctaatgagctaattaggagtttgggacattttggcattttgaatggcttacttgattatctaaagggaacttttaccatctcaagaggaattataattggccttagggaataatagaatcacctaaagtataagaaagcctccctcatgttggcaaacaacctgtctaacaaatgtcccctttgacaaaacagcccgcagtcacaaatacgagttgaaatcgtaaggggaactctgacaggatttacagttacattaattgctcgctcttggcatgggtgatttttgtgattagaagaggatcagagcagctttctactcaagtctttggcttgaggctgatcattctccataaacaatgacacctttgggagggcagccaaaaatgtcccatagagaaatatcaggagagattcttacttaatgagatatgaataaggctgttgagctccaccagatctttgcttgtctccttaatgaggaaacatcacagtgggtgaagtggtgataatgttaataaccatgatccaattcaatgaatggtggaagtaaggagagaattcaggaaacagacgtaacacaactctctatacaaacctctgggtcagttatgtaacttgattttatgtttatcttcaagtgagggagttagtgcgcctggcttatgcagtagttacacataagacatgtagatggaagtctaataagtgaaggagactaaatagaaagtcagatgtacctcagggagaaaacgtgattcataccaaaactcactctacggagtgagagagctactcagcactttaatggaggatatgatcaagacttgattttccatttcgttttcctttttggaattatgcacttcccaacagaaatgtctaatttggaaaaaaaaaaaagggacctccactgtcaagttgggggaatgagggcaggaaggagaaaatgaatataaaagaaataaatgaaggacaagtttgcaaaaaataggttgtgcaagaaccaagaaggtttaaaacaacgttcagagtaatgagctcaattcactaggaatggggagttcttgaaggaattgaagcaaggagattacctgattagagataggttgcattttaggtaaaggtagaaataattattggaatttagaaaacctcccaaaatacctgattataaaatcaaagttattatctagatattcaagtattaaataacttttaaataacctgaaacacatggatcttcacatatgtgaagaaagcattttcccagccacattcattatccgtaaaacattttacagtacctgtcatagaagacccgtcccatttatatataaagtttcatcggtgctctttaatgtcacattattttaggtatggttgtttcaactgagtgcacacatctattagtgctaagtcacattggataatgaagcactgttattcccacgaacctgtgttaggtggaccagggattttaattaaatatctgaatgagtgttgtaaagtggatactctctagaaagcatctgtcagggttaatactttacaagttagctatgcctctttcaacctttaattataatattctaactctttatccttagttactgctaataatttcaaggttatacagatagaaattacttgattatccaagtgcctgcacttatcgaatgaaatagaaatcaatttcactgtacatggtttataagtaagcaatgctaacatattattgtatttttctaaaaaaattctttttttaacaaaaggaattgaaaaccacatgatatcctgtggttgaaagtgcctaatgcctgccacatatgtaacaaaagtaaattcttaataataacagtgatagtcctcctgcatccaataaacaaacgcacttcttgatcattgacaattcttcagctctctttaagcattgatctttagtccttattaatttctcatagtgtcctgcttggcccccataagtccatttcatcatttaagtatatggccttgccacttccttccccacaagtagactttggccatttctatggatgcagcatttagaaaagatttgctttagcccttaattttcagaatcataaagcacatcaataattttttcacctccaagccaccccttcacaccaccttcatgtgggctgaccaagcagtgggccattcaggagtcaggcagttgctgttccttgttaggagaagtagaaagccatgaccccagcattgatatcaaatcttttaaatattggttatggggtattttgacttttatcttgtttgattcttttttttttttttatttccaatcactgttttgataaaaatgtgttaattatatgcttctgtttaagagtcatgatgttactcttctgttgatggacctgcaaacttcatttattataagacaatgagaagttattattctccctaagaaagctagcttagcattcattttaagaatactgaagaaaactttgattctctaactagaaaagagagattaaaagtatttaaaagtacaaaggaagttttttccctctcaggcctctcttggttcctggtttgttgttgttgttgttgttttttctaatgctgcttcagttaacaatgccttgtgctggtatgctattttttaaatgcaatggagggaacagatagatcttcattcttcctaagagtagaaaattctcattatggagactcataatcttcaatatttgaagactatattcacaccagatcagaataatgataagttaagcagaattgaaacatattgaaatcatatttgacactggaaattctttaattctatgagaactatatcattatagttctcattttataagaaagttatttaatatattttaaggatgataatagcacattgtgcgttaactttgatgtctctttctttgacagtttggagactacattggcttgcaatggagaataaaatctcaaccatattaatgggatcatcttttattctccaaggcctaagtagtttccagggcacatgatgccccttatagatcctcatttgtccttacagtgtcttcattctggaatgtgtaactaaagtaaattccaaaagtaaatgttaaagaatcatttttaaaaccaagtaaaataatgaccctcatgctgatataaaatgaacacatattaaatatttaactcattaatgtaggaaccaataagatgttgtaagttcaaaggagaattcaaagaacagacttaattatagattaggaatattgaaaaaaatgtgaaaattgaaggaaaactggcctgggccatggtggaaaaaggaagccaattgaaatcctgtcagacagaatgttgcatttctataggaatattattttttgcattgctaatggctattgacaacttacagatttgtaaaatggctcaatgcaaggttggaatgagatttcctggaataatgtaccgtagacaatgcagttttccctgaataacacatttttcccctacagtacattgttccctctttattggataactagtatttaccattaagattttgctcaagcatgtaccataagaagccttccctggtaccttctgtctgtttttaggtttccctctacctctcaaaatagcttataaataacaatcactggtctctatacatggcattataattccatatttatgatttccctcagtccttcttctttaagaccagaactatacctttttattttatttttgcatagtatttgtatagtgttagacacctagacaaaattgacaagttgcctacagaatgaatgagtgaatgaatcaagtagtgatggatgtatgcttgtgtcaaatttacatgagcatgtgtgataggaaaacatttgtcatgcaggatgcatcagggatttgagcatggtccctttaactctgagcattgcacagctcatatcattactaaattaaactctatgcttacctgactttgctacaaccttactctctgatcccagaaaaattctgtataccttgaaactaatttatattagtgaaatacatattctttattcttgcaaaactgcctgtgaaaatgttttttaatcataggtcatttgacattatagtaatatatttgcaaaagtggaaagttttgcataagcacaagtaatgatctttaactaccttagaaatgatttaaagtaggtggtcaaagaatctttacttttctggtatttctggcattatggcaaaagcaacgaagcaagagctagttccttctctttacttccttcctgtaatctttgcaggttctttgtacatgttaggaaataaacctttattagttgaatctctaatctgttagtacattttttaaattacttagcattaagtctataatgagtagacagagaccatatacatgacccattatttaaaggttcttaaatttcagatatgtttacacaaaattgtgcttcttccgaatccttatttcagatgattcttgtttgaatatatgttggcacctgtatgttcaaaacagtggaggtgtcttggaaaccgcaagatgcatcctgcaaaaaggtagagggtggtagagagtgtcctgagttttaaataagtagatttttggatttgaatttgagctctgtcaatttctatatgcatgacctgaagcaagctacttaatttctttctatttcattttccttatatctaaaatgagaataataatcctgatttcatagagctgaggtgagggtaaggcagacaatgaatgcaactgacttatgaaagcaactggggaatgcattcattccccagccattccctggagtacaccttgttttatctgcatttgttcatccctgtttcttactccttgtcagtcaccaccttctttaaatccttcatggttgagcttaaaacccacccgttcctgccttgttgattggtttttcttgtcactgccaagtagactgtgggctcagtgagagcagaggctctgctctgacttgttgagagaccccagagcacctcctacggtctggcagcccacacccagtggactaaaatgcagccctggcaccatctttctatacttcttttctcagaggtgttgcctcattttgacctgtgttctctagaaacccaagaaattttctctaaagaacagacttaaagtgaatatagtttactccgtgctgttcatggttctgaatagagttggcgcatatatagtgggtttgattttctttaccaagctgccctgtagttcgagcagcttgcacatatgcttccagatagactcgcccagcatgccttccagaatccaatacagcttcagaattccagagagtgaggactgacctagggtcaaatgcattaacctgctccatcaccaaaatgctgctggaggattgaacagatgtgtgtcaatgcttgtggtatcagtaaaacatacgaaaacatggatttattttaactccctgtggtctgaagctgtaaggtagagatacaaaaattcatacactgtgattttttttgctgttattttcttcttcacagtgtatttattccttctgagcatctttggccatgcactgtgttttctttaatgaaagtagaaaatttgtatcctcattgcttatttttagcactgttgctatgataaactgtagcctaggcatcttattaaaatcaattgaggatttgaattattattccctttaatattgtggcattactattctttctgaaaatatttcaccatgtatgaatctatccaaatatttcctatgacttactggaaagatatttctcatctatttaagggatatataaaaaatagcctcataggggttggggacaaatgtttttgttttcctctggattgtttttgtgggaaagtgttaggtgcaattatttttttcaatactctgcttaagaataatttgtaatatctttaggatgaagttgcatagtacaaaacaactttttgtgaataaagtaattgacaattttggttttaattaccacatgtcatgactagtagacttcctaacaaaacacatagattgggcaacctgaatttttctacataaaaattgaggtcttacaatatcatgaggtcttacaatatcagtgaagcaataatctgcattccaagactttatgctgtttcacatgtgtaaatagcaactacagcatctactatttctgccatggagtctgggactgtttcaaggctgttcatctatgattttcattctcagtaccaggatcatgggcaggaatggagcttgaagagatctgggcccactcacaagggtttttaagaatcaggagatggtaattattaagaggaggtaagaactgagttgaacctaaagggtcgacttatattttaggctgttagaccagaattatacctccctttaaactagataaacatactagcataaaacaacctgcagtgatgaaggggaggccattaaacccaaagagtcctagttctaggccaagtgttaggctatctgctttcgtaagtacatcccatttaatcttcctaacaaccctgctaggcacaagttattatccccatttcacagatgaagaaaccaggctcggggagattaaataacttcctcgttgtaaggggttgcactggcatttaagcttagcccttatgattcaaagcttatgctttatgttatatgatgctaaaataaaggcatggtttttttcccatggaagaatatccttcatattttttaaagttgtagtaagtagcacataaatgagacctactcttaagaaattttataagtgtatagtacagcattaactataagcacagtgttatatagcagttctctagaacttttgtaacttgcatgactgaaactctatacccattgaatagaaactctccataggtctttacatctataactaaattctgatcacccattcctgtcccggcactgcttatttgtttgttggttttgttttgtatagagggggaaaggtgccacattaatgccgagttcaaggtcactgtttaacgaacaggtcttggggtagcaattgctataacatgtcaatagccagattcaccataaaggtgatcagactactaccacgctgttttattaatcactgtatgaatttgattataatttataatcaccaacatagtttctgttccatttaggtgacagactgttgatttactttgaattccaagatgacagtgcccctctgagtcaggcagggtatattttaagtcacagttacttgagaagtccctccccaaagcagatcacagacatcacttcttcatctggttgagaagcttctggatggagtcagactgcctggcagatcctggctgcactccagagaactatgagcactgccagacagccccctggcactagggctggccaaacagtcatggcacaaggatcctctgtacttttactgggcaccaagcccagctccatcagggcagaatgtggagctcagcagtttgaagtctggtctccatggcactagggccaaaggcaagctacagaaattccaaggcaactgcattgtctctggtgtaggcacatgacacattccacccaaaaaattaagagaggctgtatcctgtccctgatccaaggtaggaagaaaattctctccttttcccttctttgttcacattattcaaattgctttcaaacggtttgaaaaatcgatttttttctaataaactcatggtcttttaaacaggtctaacagcattggcaggatctcatatgaatgagcacagtactagaagacatcacgatgaggccttattccaacttcaggttgcagtgtgttttcaacatggcacttaaacttggtgaacctcagttttctcttattttaattacaatattcatggcatctgcctcacacgggctttccagggttgttttgagaactaaggggaaaactgtgtgttcaagaatttggcaaactggggacatagtgtgtgtatgccatgtttatgaatactcctaagtaagtcaacttcgtaagggttgggtctctgtggcatacagaaggtgctcatgaatgcctcaaaagtcgtggaaaggaatcttagtgtggggaggggggagagagagagagagagcaaaaaaagaagaaagaattcaaatctcggaaaacccaaatatgcttttgaaattagtaatctacacccagtaaaaatcttaaaatcttgcttttgttcattatgggatacccaagagatttaatctttcactaattgtttaaaaatcttttataaactgaaagcacacccaacattaagagttctgagcattctgaattacttacatttgtaaaattccttttgaaaaatgtaaaccaagcttatttcataatggtttcttcaaatcactttttcctattgtagtgtcctttactgtctatacacgggatcacatgttaatagtaccaactgtcctgagccctttccaaacaccaggctgtatctaaccctttatcataagatgtctcattgacttctcattgcaaccctaagatggtcatttttaccattttacccactttgcagttgaagctggttggagcagttacataactcaagaaaaggggcaatgctcataagtaagaagatgaggactcaatttcagactactagaagtcacaacccatgagttttgttttgttttttcttcaaagagccattcaagactccatttgccaagcctagacatggcttttatggagtgaatttgatctttattaatagctggaggcactgcataaaaggaacttctggccagagcctagtggtagttaatcccagtgacccagcctcattcattcatctgtttgcttctgggactaccacctgaacatttgttttgtcttggcttcttccctgcagcttgatacttcacatgtgtctctgttctgtctctcccagttcatcaaactggtttctgtcatcctcttttccatgtttgacttcttgagcactccacttgtcctccctgatcaacactagcctagtgaggaagagagaggccatgtattctattttcaggttgttttatgaagcagttaggccccactgagctcagaggagtgtgctaaggaagtctatggaaacaatgcacagttgtataattttgttttgaaatgtgttctgataatactttttcaggcatcaaagttgcctaatccctaaaaatatacaggtgtattatataaagaggataagatattatgcagcttaaactcctggaaaagttctcattagttatattttacaaccaagttccaatgcgaagcagcctgtttgtgagtgatgattagcgctgccaatgccccagcagtagcaggaaagaatgtcatgaaatgatccaacttccattagaaaataatgactgtcttggctgagcaacattttttaaattaaataccaacaattcctagtaatcagagagcctattagccatgaaattcgatttcagtatcagagactattcacttaccaaatgggagccaaataattgtgagtggaatttacagtgccgcattggggatagtagtaaatattatggaagtggcactagggtatagcttcagctctggggaaatgtggcattttaaaatttcagtagcaagttagtgtgatgattaacagaatgcagtcattaatttccaaggcatgatattttctctttagtcatttgagaacccaaggtcttacagtgaactcgtcattaattgctacttagcttcactgggcttttccaaatgtccatcagctcccttgagataaaatcaggaatctttgcattagaattagccttaatttatggagggaggtgttcttgatcccaggagtgatctttaggaagactggaaaataagtttatcatttctgccagctcaggtctaagtattctctcttcttttcacatggtctctcctgacgcatcactgcccaggtcacctcttcaatccttcctcattctttgcaatccctgttcagggatatgggaagaaagtattcactatctacttctgccatgaattgtgtcaagtaacccagacacaaatagtggaagtatattattaagcaggcccatgtagattaaatactgctccacagcacaaagttaataagggttaagaaggaggattcatacctaggtctatcctcagaacacttgttctttacattattgcactatggaaataaaagttgataaaattttaggtgaatacattgctctgccattttctaatttcgttttaatacattttgaaggaaacttaagcttggaaattaatgttttccacatgcagcactaaattccaccaccgtctttcaacagtacaaatccaatggaggaactttcagtatttttcaaacatatatatacatccatgcatatgtatacatgtatagtatacacaaatatacccatatgtatacacatgcacacacaaacacagacatatatacatatatatacacttatatacatatatgttatatatacaatatatatgtaatatgtaatctttcataatatctttcttttttatccatgaggactgaactttgcctaactgaaaaatctctctcttggcacccatatatgtgtctctacaaacttgttggcaaactgtatactggcacatgcattctacaagaccaccaggctcaaaagcagaacatttggcggatagaaactgcagtggcaggctttctaaagaataaggcaggagaagaaccccacagagatgcatggagaagataaaacaatttgtctgttgtcacaccctaggaagggtcaagccaggcattcaatccatacttagctggtcccaaagtccatattctgtccactacattaacctgctgctgtcagaaaaagaaaatgacagatttatagttctcctctccctgccccagtatatgtcagcatttttaggtatatttgaacaaaaactgaagttcatgcatgtcaattgttcttctaaaagccttcttagtggaaacatagggaaacatggcctttagacatgcccaaagtgaacacatttgttagaaaactcagtgttatgatgtatcatttagagttaacaggtaaaacattgcatatcagctgattttaggaaggaccaaatgccatgcatatttctgccatgagtgctttttacttgccatagtgggccataagtaattaaactatgtcattcgcatttgaaaataccatgactacaggccttacaaatagtctccttcctaagttctgtggctgttagaatctgggaattgacattgtttctttttttgtaaggagtccttatggctttcagatcccttactggaattcttgccacaagagggatactgagcagtgaaggtttacaagtctcccttgcgcttgtgcatatggattaacttcactcttttaataccttacttctccatcagttctagagcccactgtgagctgaggtgaaggcacattttccctcccaacaggaaagtgaccaatattatatttacttcctggggcaaatggctttctgtcagctttacttgtaaatctgcctcattctactggatctatctctaaacctaattgcttgcatactgcccaaagccacctttgggagctatttgtgaagactttgtctcatttgtaagctacaaagtctccaaaacacatattttccctcataatcagaggttgtttttgctttggtcaggaacaacattcctcaaaatatctgtagggggctaataagtcacaaagtgttcctgagtagaccaggaggtgtatgacaaagatctatgtctttctccctccttctatccttctctctcccttcacccttccttccttctttccttcttttcttcctttttgccatatgaaagaagaatggtctactgatctctctctctctctctctgtctatttcattaaatggcattgcattgcaatcttcccaacaaccaaagtcagagttgaagatcattcagtccaatctccttattttacagttaaaaaacaaaaacacaaaacacaaaactaccccagatgggcgaaatgacttgatcaagtcacatagtattgggcctagggcctgaacccagattctttgagtccaagtacagtttacttttaggtagttagagatataaagtggccactgagatacagtgcaatagaggatttccggctttttccccatccaaaataatctcagtcaaagacagtttgagggaatatactgattttgaacacgaaaccaaaattatagagaacagaatttttttaaaaaaatttgagtatatttaatttattgaaaaatttaaattggatattatttgtttttgttgcttttatttccaatggcgatggcatttggaactgaaatttaaaatgtaggattaggaagtagctttcacatttatctttattttttgcaaatacctatgcatatacatagattttcaactatgttttcataggatttaatggaaattgtcaaaaatgtctcaagatagttatgatttttaaatgttatgtttagaattactgatcaatttatgatcaaaactgcaaacagtaattgtaaatattttgaagttggtgctactgtatttttccccactatttgctactctgattcttaaatttaatggactcatgttgaagacaaagtatttacagttataaacacataatacatttagaattgtcaatggaagcttgactttttctcacaggatggttcattgtggttaagacttcattagcatcagtaatgtgtaggaaacttaacctctcattttcaaatgaaaagtgttcagaatttttcaactattaggctgtttgagttatctgtgctagacatttcttgtgatatttttgtcatttagtttttatctgtttttaatatcaagggaaagtgaatgctaggtcaacgtattttgaataaaattatagacaaaaccttttgagtaataattatgtagtaggatgcaaactgacacataatggcaacattcgcaaaacattttattagagattttttcctaagaggacatgaaattttggcattatttttattctgctatatttgtcattagatatgtagacagtttcatgcctgctcatttaaaatgtatgagaatctgtagcagtgtcactggtccctgggaaataaatgatgtcattaaaataacattaggactttgagcttcttaaacccagaattattatctttaagtgaggacagctgcatggcagaaaatgttgatgagtctcttagtgcttaattcaagtgttgtgtgatggttttcctgtacaaatctacactatattgatagtacctgagagggaagaaaacaaataagcaagttcaagcttatgaactactacatttctccacacttaagtgtgtcttatttcttacctcaatcaaatattagttggctcagaataaaacttttttttaaaaaaagctaaaattatctctttgctttgcttgttcttgtggtactactgtttcaaaaagtcattatttagtgataaatatatttgtgttcagggctgttattttaagttagaagagtagaatatgtagttctttttatcaaataatcccagtccttaacttcttaattttgatcaatttctgtttgggtagtgaatatatttggagtatttttgcacactggagaatcatcctgtcacctccacacatggaataacataggtaggtataacactctggtccatttctgggcagttgctttgctttatattatatatttttgatgatctaatgcttgtaatacagtaagtcctcacttaacatagttaataggatcttggaaactgcaactttaagtcataccacaaaattggttttgacatataacaaaaccagttttaccataagctaattgatataaacaacagttaagttcctgctgcatatttctggtgtacaaaacatcaccaaacttctaaataaataccaaagctcttctaatattaaacattgaagtaaagtgttatctgtatatacatttaagatagactaataaaaacaagtaaggtaattgtttatttcatttttggtgaatgagtgagcgacagtgattgtttgtattggtggtgagtttaatccaggaatgaaggtttgcaaagtgaaaattgtcagggacgcttcctaccaccacacagttaacaattacaaatatggtgagctaaccgagagcttctgtaccacataagtttattgttgagcatgtgtatgattatcatatactttatgaagttttgctttacaataatttgtatttattaattcactttccaactctctcactgtagttcagggttgcaggtggccagatcctatttcaggagctcatggggcaaggcagcacctaaccgtggacaggatacccttccatcatagggcacactcacccacatacccacactcactcaggctggaacaatgtagacatgccaacaaaactaacatgcacatctaagggatgtgagagaaaacaagaatatccagagaaaaaccatgcagacatggagagaacatgccaacaccacatagacagcgaccccagctggaaatcagtgtttttcccccattaacatcataacgaaataattttttttaatttttattttattattattatactttaagttttagggtacatgtgcacaatgtgcaggttagttacatatgtatacatgtgccatgctggtgtgctgcacctattaactcttcatttagcattaggtatatctcctaatgctatccctccctgctctccccaccccacagagtgtgatgttccccttcctgtgtccatgtgttctcattgttcaactcccacctatgagtgagaacatgaagtgtttggttttttgtccttgcgatagtttactgagaatgatgatttccaatttcatccatgtccctacaaaggatatgaactcatcattttttatggctgcataatattccatggtgtacatgtgccacattttcttaatcaagtctatcattgttggacatttgggttggttccaagtctttgctattgtgaatagtgcctcaataaacatacgtgtgcatgtgtctttatagcagcaagatttatagtcctttgggtatatacccagtaatgggatggctgggtcaaatggtatttctagttctagatccctgaggaatcgccacactgacttccacaatggttgaactagtttacagtcccaccaacagtgtaaaagtgttcctatttctccacatcctctccagcacctgttgtttcctgactttttaatgatcaccattctaactggtgtgagatggtatatcactgtggttttgatttgcatttctctgatggccagtgatgatgagcattttttcatgtgtcttttggctgcataaatgtcttcttttgagaagtgtctgttcatatccttcgcccactttttgatggggttgtttgtttttttcttgtaaatttgtttgagttctttgtagattctggatattagccctttgtcagatgagtaggttgtgagaattttctcccattttgtaggttgcctgttcactctgttggtagtttcttttgctgtgcagaagctctttagtttaattagatcccatttgtcaattatggcttttgttgccattgcttttggtgttttagacatgaagtccttgcccatgcctatgtcctgaatggtaatgcctaggttttcttctagggtttttatggttttaggtctaatgtttaagtctttattccatcttgaattaatttttgtataaggtgtaaagaagagatccagtttcagctttctacatatggctagccagttttcccagcaccatttattaaatagggaatcctttccccatttcttgtttttgtcaggtttgtcaaagatcagatggttgtagatatgcggtgttatttctaagggctctgttctgttccattgatttatatctctgttttggtaccagtaccatgctgttttggttactgtagtcttgtagtatagtttgaagtcaggtagcgtgatgcctccaggtttgttcttttggcttaggattgacttggcaatgtgggctcttttttggttccatatgaactttaaagtagttttttccaattctgtgaagaaagtcattggtagctttatggggatggcattgaatctataaattaccttgggcagcatggccattttcatgatattgattcttcttacccatgagcatggaatgttcttccatttctttgtatcctcttttatttccttgagcagtggtttgtagttctccttgaagaggtccttcatgtcccttgtaaattggattcctaggtattatattctctttgaagcaattgtgaatgggagttcactcatgatttggctctctatttgtctgttattggtgtgtaagaatgcttgtgatttttgtacattgattttgtatcctgagactttgctgaagttgcttatcagcttaaggagattttgggctgagacgatggggttttctatatatacaatcatgtcatctgcaaacagggacaatttgacgtcctcttttcctaattgaataccctttatttccttcttctgcctaatttccctggccagaacttccaacactatgttgaataggagtggtgagggagggcatccctgtcttgtgccagttttcaaagggaatgcttccagtttttgcccattcagtatgatattggctgtgggtttgtcatagatagctcttattattttgagatatgtcccatcaatacctaatttattgagagtttttagcatgaagcgttgttgaattttgtcaaaggccttttctgcatctattgagataatcatgtggtttttgtctttggttctgtttatatgctggattacatttatcgatttgtgtatattgaaccagccttgcatcccagggatgaagcccacttgatcatagtggataagctttttgatgtgctgctggattcggtttgtcagtattttactgaggatttttgcatcaatgttcatcaaggatattggtctaaaattctctttcttggttgtgtctctgccaggctttggtatcaggatgatgctggcctcataaaatgagttagggaggattccctctttttctattgattggaatagtttcagaaggaatgttaccagttcctccttgtacctctggtagaattcggctgtgaatccatctggtcctggactccttttggttggtaagctattgattattgccacaatttcagagaacgccacaaagatactcctcgagaagagcaactccaagacacatgattgtcagattcaccaaagttgaaatgaaggagaaaatgttaagggcagccagagagaaaggtcgggttacccacaaagggaagcccatcagactaacagcggatctctaggcagaacctctacaagccagaagagagtgggggacaatattcaacattcttaaaggaaagaattttcaacccagaatttcatatccagccaaactaagcttcataagcgaaggagaaataaaatactttacagacaagcaaatgttgagagattttgtcaccaccaggcctgccctaaaagagctcctgaaggaagcactaatcatggaaaggaacaaccagtaccagctgccgcaaaatcatgccaaaatgtaaagaccatcgagactaggaagaaactgcatcaactaatgagcaaaacaaccagctaacatcataatgacaggttcaaattcacacataacaatattaactttaaatgtaaatggactaaatgctccaattaaaagacacagactggcaaattggatagagtcaatacccatcagtgtgctatattcaggaaacccatctcacatgcagagacgcacataggctcaaaataaaaggatggaggaagatctaccaagcaaatggaaaacaaaaaaaggcaggggttgcaatcctcatctctgataaaacagagtttaaaccaacaaagatcaaaagagacaaagaaggccattacataatggtaaagggatcaattaaacaagaagagctaactatcctgaatatatatgcacccaatacaggagcacccagtttcataaagcaagtcctgagtgacctacaaagagacttagactcccacacaataataatgggagactttaacaccccactgtcaacattagacagatcaacgagacagaaagttaacaaggatacccaggaattgagctcagctctgcaccaagaggacctaatagacatctacagaactctccaccccaaatcaacagaatatacatttttttcagcaccacaccacacctattccaaaattgaccacatagttggaagtaaagctctcctcagcaaacgtaaaagaacagaaattataacaaactgtctctcagaccacagtgcaatcaaactagaactcaggattaagagactcactcaaaaccgcacaactacgtggaaactgaacaacctgctcctgaatgactactgggtacataacgaaatgaaggcagaaataaagatgttctttgaaaccaacgagaacgaagacacaacataccagaatctctgggacacattcaaagcagtgtgtagagggaaatttatagcactaaatgcccacaagagaaagcaggaaagatccaaaactgacaccctaacatcacaattaaaataattagaaaagcaagagcgaacacattcaaaagctagcagaaggcaagaaataactaaaatcagagcagaactgaaggaaatagagacacaaaaaacccttcaaaaaattaatgaatccaggagctggttttttgaaaggatcaacaaaattgatagaccgctagcaagactaataaagaaaaaaagagagaagaatcaaatagatgcaataaaaaatgataaaggggatatcaccagcgatcccacagaaatacaaactaccaacagagaatactacaaacaactacacaaataaactagaaaatctagaagaaatggataaattcctcgacacatacaccctcccaggactaaaccaggaagaagttgaatctctgaatagaccactataacaaaataatgttattcaaagttcatctgacatgctttttcatttattcttcgtacggtataggaagaataagtatatgctttttatgatatacttaggtcttttctcaggttaggaaactcttcttcaagtaaggctttgataattgtttcactgcaaagattgctgccttattttttagatttggatgtctgttgtctgcattcaacatcaatcataagaggacccttcatcattttcaccttgtgtgttttagatagctcaagtagtttctatataacactcctcatatattgctttggatacattctgtttcttaatgtttccaatgggtgttattttttctgctgttgcagttagagcttccttaaatcctacttctttacatttaaaaaacaattataagggggctgccaagtaactttccaaaattttctcttagctcctattgaaagctattttcaaagataactgttccccaagactttatgttgtttctgctttttcttttctttccagagtttttggatttttatgtgagatttttgtgtacatttagattgcagtgagaaaagcccattccaaaccccatgtttttcaaaagagagggtctatggagaacccttgggcactctctgcatccaattggatgctggtcaaatttctgtctcatatcaatagctgcaatagatggatatgagtagcccagagctcagtttaaaagcaccaagctgacattcatctcgtgtgaccctgctggtttgagatgaacccataaaatccataaaattaaaaatctcaataatcatagcccctaggaatctaagaattgtttatttcctgttgtgcctatagtgttgaatttgcaggaatgacttattgtagaacagaatatgtttcattttctgtaccatcccctattatccaccccacacactcaccagcaacatatggtcttcctttccagtgttttctctgaaacttcagttctgaacagatatgctaagatggataagcagtgatggggctgaaggagagcgatgctttaactgcactttgtgttcaaggagtggaatattcagacatgttagactgagtattaaatgttcaccaagtcacttcaacctcatccttcatttttaattttcttcatacattactgtcagaaattattctgtttaattatagattggtgcaaaagtaattgaggtttttgccatcaccttcaatggcaaaacctgcaattacttttgcacccaagtaatattttattataaaccacagcacatagtgcattctcaacaaatgttgctgttgggatgcaggaatggatggatgaatagatgaatgggtggctggctggctgaatggattggtggatggatgggtagttgttcaggattctcattggtatgggatttgtgctgttagtctgtgtgtcctgcagactaacggcacaaagaaagatagaaggtcttgctacctgctctcagactggtataactcacattatttggcaatacagagactctcagtcttagtttttattgggagtgtaaattttgcctctttgctatgccttcgtagacattttggtggaaagtggtgacagacagtgtcacaggctgccaaccaggtaccactttaaccaccaagactctgataatgtctcgtttcctcctcccatctctaccccttgcttcctctcagactcctcctactctctgtctctccagccatgcctccacttgcagaatatccttctctctacccaccgttcatctttaccctggtcatttctttagccacgtcctcatgcgtatccagcatttctatcctgctgtgtcaaatataagacacattctttaactttagagggaatttatattttctcgtctgtagttttctggaaatagtggggaggttgtaggctgtgatcaatttgggagccatttaatggcagtaaaatgggcaaagcaatatatcgagaattcttcaaattgatatttatctattttcatccagccttaggtattttaatacagatacaacttttactaccagcaaactatagttagtaattgattttttgcttcctatttcaaaagctacagataaaaggacattaatttttaagaggccactcaatcagaaaatgcattcttcacttagagtggtcaaaagagcagtggagtggaactcaggaaaccagaggactagctctgactctgccacttacattgtttgaagcaaggtatttctgttagggacctccatgggccttcactctaaccaacttttctgtcaccttcatgtactaagagtctctgatcccgtgaggatgacgtctacttgcccatcactgctcctacctgaaacccaaatgtgccgaagtttggatcccagcacaggctcagcatcatcatggatgatcagctcatagtcctagaactggctgtggagacttttctgaatatgaacattgtttttaaatcagtgttagtaaacatggactcaatatttacttgaaaagaattatttcagttacagattgatgtagttcattttaaccaccttgtgtatgaaggatgaaaaatgagtgatctagttttgaagtaactacaaaaattgtgtttgtatcaactgtcctgtttatttttgcttgtcataatgagaggacatcattattaaatctaaattatctccaccacagtgtcactaaatatgatcagtcaactatctctgcttcctttacttgagatctgttgaactaaggtcaaactgagctcaagcttctcatccagattatggcaatacacacctttccccaccaattgttctttaaagcattgtgagttggcttagcaatgtcttcttccatctaaaggtgggtcacagcactggcaaatgtataatgttggactattgctgggagccacataccgcattagatttttttttttttttggtacgctaacagctcctcattttctggcaatgtatgacaggcagaactgtaatagttatcctcataagcaatgtgcaagttagataattgcaatactaaacacaatgaatattcagtttgtttaggggcactgcagtgaaaaaaagaaatgcatgtagttgtgatctacctgtctcaccaaaactcacatttagtctttcctaaaaatacctgaacttcattaacatcaacttcaccagtactctttcagatgactgcatattgaattaggctgaagggaaggggaacagtagcccatggggtcatatcagacttgtaattctgctctttccaaaagacttacagtgacagccaaccacattccaagaactgcactggtcaccagagatgcaggaggaatgggccatcatttctgtgcccaaggagctcacacagactgtaattacctctgggaatctcaaagaccaaagcaatgtgaaattttgtccacattgttctcaatagtgactgagctattctatatttgttccctgatctgttttaagaatgaaaatatagagaaattagagttcaggtgagaagagttaaagtgattaagaggatggtgaactcttctaacaagaaactaatagcgtgtagcttagttcaacagtggtaagtggagctcatgataatgatatataaatgtttgaaaaatataaacaagaaggggcaacattgtttagtattattcaattacaagtgattaatagcaatgcaaagtaattatgaaagggaaattaaaaatggacataaggaaaaaaagttttcttttggtcttgtttcctaaaagaaaatatagggctacattataggaaagcatttgcaactacacaagaaaatatgaaacaagcaagctaagagcaagtaatttaccaatggtagactaattattttattaattcattattaataaaatttattaattcatttatcaaatgtttttattcattcatttatcaaattaattattcatcaaatgttttaggttactcacctatttaacattttctttgctcccatgtattcatgtatttcatttgattatttttttttttaacatttcagtgttccaaaaattgggagacataggcagtaatatattttttaggaaaatactggtggttgtaataaataatctgatatttcagtagtccaacacattaaaagtttggttctcattcatataaagtccaaatcaagtgtttattaaaggcagaaggatgagggttggattgtgggagtcgatggttggaggggcccagatccatgtaatcattcagagatccgggctgaggaagatccataaattcactgtgatctccacagccagctggaagataagagcagaaagagactgaggaagaagtaactcctccttacacactcggttccagaagacactcagatcagtttcacctatattccattgttgagaattcatggaatgacattgcttggatgcactgggcattgggaaatgtggcttctttcctagcatcatctctacaactttcaggagagcatgagtttttaatggacaaacaggtgaataaaacacactcaaattcctggcctcttggaaaatacattttagttggaggaaactgatagtaatactataaaatcataagtgaaataaacattttttttgtaaggacataaacattgtgatggtatgtaaagcctggaagaagtgcagggagtgttgggtgtgcaattttaaatggatagtttggaaggagctcagtggaaaagaggtatttgagcaattatttgaatgaggtgagaatgtaaatcatgtggaatgtaacgggaaattatttaaagctgcagcgcagcaaatggaaagctcatggggtggaatcatgtctgatatctttagggaacagctggtggctaacctattaggagcaaagtaagcaaaggttagagaatggtaggatatgaggtcggagaagtaatagggttctaaacatacagaggccttaagagtgacagtgagaattttggctcttactctgaggtacaggggaagtcattagagggtattgtacagaggagtgaagtgatttgatttatgttttaaaaggattactctagttgttgttctgaaaatagactgtggtgcagtaaggcagaaggagggagaccattagaaagctttttcaataattgaggtgagaaatgatgacagcttagaccagagatattgagaagtggctggattctgggtatattttgaaggtggaagtgacaggatttgctcatggcttagtggtaaggtgtgatggaggaaaggagtcaaggatgactcgaagactttgtgcataaaagactaagtggaagagtaggatttttattaattgagatggggaggactgtacaggattctcatttagatgtgggtggagcacataagggtcttgatttggaatgacttttagatatttaagttgagctgacaagtaggcagttagatatatgaatatggtattggcatggggaatggaggaatagatccaaatattgagctccaagggactccaatatttagaggctggagaagtggggaggaaccagcaaaggggaatgaaaacgagtgacaagagaaagaaaatcagaaaagtctagtattgagaaagccaaggaagagaagtgtttgaattaagaaagaatgaggctgagccaggaggatctcttgagcccacgagttagagaccagcctaggaaatacagtgacaccccagatctataaaaaaaaatagccaggtgtggtggtgtgtgcctgtagtcccagctactaaggaggctgaggcaggaggattgcttgaacatgtgaaatataacgggaagttcaaggttacagtgagctagatcataccagcacactctagcctgggtgacagcacaagactctgtctctcttaaaacaaatcaaagaaagaaagaaaggaaagaagggaaaagaagaaagaaaagaaaggaaaagaacagaaaagaaaagcaaaaaggaaggaaaaaagagccacagtctcagctgctgctgacaggtcaaataaaatgaaatagagaggtcattggtgatcttgatgaaaaaagaaaaaagaagccgagcgcggtggctcactcctgtaatcccagcactttgggaggccgaggcgagcagatcgaggtcaggagatcgagacaatcctggctaacacagtgaaaacccatctctactaaaaatacaaaaaaaatagccaggcatggtgacaggcgcctgtaatctcagctactcgggaggctgaggcaggagaatggcctgaacccagaaggcagagtttgcagtgaaccaagattgcaccactgccctccagcctgggcgacagagtgagactccgtctcaaaaaaaaaaaaaaaagaacaacaacaaaaaacagttttagtgtagtgatgagcaaaaactgactggagtgaggtaaagagaaaatggaaaaaggcaaattggtggtaattatttaatttttttatctaattgttttgaggattttttctataaaaggagcaaagagcaaagtgatagggtgataattagaataggaagtagacacaaggaagggatttcaaaatgggaaaaatgacagcacatttgtaaagcgatgaaaaatttacaatgcaagaaagagaaggggagttaatatgcaacaatcttatgtcgatgagaagggctggaacaggcactctagtgaagggactggagataaaggcaggtttatctgtaatggttcagattaaggagtgaaatgcatggtaggcttgtgtgagttccctttgaatttctccttttgttcttaggaaataagaagcacaggtcattcagaggagaagatgtgaaatcattctttaagggaataggatagtgaatggaaaacggaaatcttcccaggcagtttcgaagaccacttgaggctaatggtcatgtgtggaaagcaaaatcattcaaccttgtgccttttaaaaaattttgtcccatcatagtacctgtgtgggagtgtgactatagcataatggagaattttgtttagcgagttagacattttttcttggtcagtacaatggcatgagagatggttaaggagtttaatacttgagcaagagaattattaaaacagcatgctggagattctaagcttggtcaggtgggtgtgatgactttaaagagttgaatatggtagtaaaatggtgaaaggattagtgtatttgaaaaaaaaaattagtgttatgctactgaaaggaatgccataggctcactctgataggaatctttgaagctaaaaggatggagtggttagttgttggtaatgagaagatttagatacaattatagaagtgaggggctaaagatgattgcagaataaagccacaggaaatcaaagaatggagaggctgaagtattggaaggatcgtcaaacttgtttaaatctgagaattttgacaggaacagtgtagatgtgacacagagccaggaactacagtcttacagctatgacattccatctgggatttttcaagtatctcattgaaattttcttttttaacagtctagttggggttagctctgagtttttgtttaaatagaaatgtttttattttgactgtagctttcaaagatgcttttctggctagaattccaggttaacaattatgttctcttagcattttcgaaatattgttccattgctttctgacttttgtgtttgctattgagaagccagtagtctaattattgtttattgtggatgactttttttcccacagctgttttttaaaacttctatttatttttacactgcaatttcagtaggatttatctacgtgtagaattcacaaccttctgattctgatcattgttatctctcattaattctggaaaattcccatgaatttttactccaaataatcattgtctttattttctattaggattttgcactttatactgcttgttggatctttccactctattatcctttccttaaaatatttctttcctattttccatcaccccttatatgtgtacttcatttcttgtattttcttcagatattttttcaatgtactaattttcctttaagccatatctgatagtctttttaacgttacatttttcatttctatagagttatttggttctttatcaaatacgtatgtataattttgttagttcttttttcctaactcctactccaatttctgttatttatttaaacatgttacacatgcatgatttatagtctctgtgtcataagtccaatatctgttgttctttggtgtttaattctgtggtatgttggttctgcctacacgtatacatggcagcttatttcctcatttgtataataattttttaaattcttttgatctttgatcctttgaaattgttggggtaatttttaggctacatttaaattgtcttcagaaaggatttctaggctactttcagataactagaggccttagcaatctataactactttaaattatactttaagtttgggtggggagtggacaagggtatgataaattttgtttcaaacatgagggcaaatttttgtttaagaattatcaagagagttctccttctccttcactgcctcctcttcgtccttcttcgtatctactttaggccaaagctaggaccttcattctaaatgagttaccatgtatcagggattcaagatactcacagggagtcttcaatctggccttctaccttagttccttatttgcatggccgactaaaactcagactccgggccaccagtgattggcatataaactgaagaaaacttcccattctagtgcttgcttactcatgtggattctctctttctttcctttcttttttttttttttctttgtaaagccttctaaagaattcccttactctcctgtgactacagtcgtgcattaaaaaccgattatttgatatgttatattattaattgtgctaaatgggaaataaggggtgtcatgttctggtaacatttactcaaacttttatatatacaagtctcattgggtgcttcatctttgtgttttctcttttttccagggctctatgtatattaaggatagcaattctaggccatacatagcaagttatttttttccctagtttgttatatctagttttaactttgataaaagtgctgtgtttttcttcttaagaccttttaagtttttatatagtcaaatatattgatctttccttttaagttctctgcatttgattccatgcttagaaaattgtctccgtcgataccataaaattattttttaatctgatatttcttctagttcttcctagaattaatattttcaacgacccgtttcatctgtagaatataaatgactccttttatgtggtgcagaatgcttttatgtataggtatgccttcaactttctattatattctatctatataatatatatttataaatatactttttctagaaaaaattagcttaatttaggtcatattgagtagttccatcacaagtttttttattttgatttttttcccttctccttcctttagtcatctcacaagtttttggtgttttttcctaaggaaacatggaaggtcattctactttgcctcaggccttgagaacaaaaatgaaaaagttggacacatcaaaaccctaaatctaggcactacagacaactgaagaggcagttcttatttagggtgatatattctttaatagaagatactctgcttgccatgggaacgtatataggaggtgcgtctgacctggacaatacaatcaggaaaagcttcctggcaggggtgatttgaagtctgtatttccagtatgtggggaatggtggagaaggagcaagaaagtcatgccgaggcaacatgtgggacgtttccagtgagacaaagcagaattatttgaaaaactaaaacagtagttcagttggggagaggtatacattgtgatgtgcaaatgctgcagaatgaagccggacaggaacaagggccaagcaatgaattgtggatgttttattgagagcaatgagatgcattgaaaggtttgaaactgtggaataatgtgatcaaatctgtattttttgaacaacatctaggctgtagcactttttatactggatagaaaatgacaaaacccttagagggatgggctgatttagaggatattgctgtaatgtaggtggaaagtaactatggcctagtaaatgtggaaggacacagatacactcagtagatatttcagggtgaatggccagattaggtaatgactaagatagcaaggatgggagaaaaagaagaatcaaggaggtgactaagcttttttcttgagcaactggtagattgagttaacattttctgaaaaacgtgatagaaggaggagctgtttctaggagggaaataaataatttggcaggagactttttgaactagatatctattgaataacaaagtgacaatgttccccatcctctcatttccattcccaattttacttctcgtcccaattcaaatcattcttacttatgatcggcgctatgtcagtgcctctcagctggtcttcccagacccagtacacctaatcaatccatcctacaccaggatggattcttcgctttccatacttgtggctttgtttattctgtcccctcccctgggagacccttctgcctacatatcttaaagcctatctacaaggacaccttcatgtcctaggtaccaccagtggcttctgatatgttcccttgatgatcagccataacattgtatttgaatatgttgtaacttagtatagaaatcatgggtactggacacaggcaaaaccacctctgccacttgcacggccctggaccccaaggaaatcaactgctctaaacttctgtttcctcctttaaaaatgggtgtaataataaagaccttgtttgttgtgaaggatacaattaagattggcacaatatctgactcccccacacaggaatttcatttcataaatggtaattattactcatattgtctacaaagccatttctcacagtctgttgctatagtagtcacttacgtgtctgtatctccttatatgaaggcatgagcatttcctttattgtcttcacaacaattaataaggacaagcacaatgtaggtacacaatatatggcatgcatgaatgtttaaataatgagagttactaggaggatagagaattacagaaaaaagacttgcttaaactgaaatatttcttactgtgtgccataaagtgctgaggggtgctgtcttctaccatgaatccttccagcctgaactgcaatgattttaaattttttgacagttctgttctccctaagagtagtaattttggtggttatgcatagatcaaagatgcaatagggaacgttttaagtgatgttgtaaataatgatttcaagaatgtgctttaatttttattgaatatcatctgattagcaatcttgtttttgttttagccttgtgaatatttattctagcataaatgagtacagtaatttctaatgcaaatattgtccacctgggtttcctgatgtctgtatggataattcaccttgttctttgttagtggaattattggtgcctctcaggttggaagatgcctgtactgacctacctgtggccagtagaaggtgggaagacctgcatattgcctctactcaacctctttctcccagtaactaagaagcctggactgggctggttggtgcggttcgctctttctgactctggttgtctcattcatgccagttcgggtgacacttgtgagaggaaggagttcagtctttgaggtcaggcctgtctggctcccaggcccaccactgccacttcctatgtttgcaatctggaaatagctccatatgttttttgaacccaagttgtattgttttggtttggtttcagtgtatgtaggtatgtgataatctttggtggcttacgtctgtaatgccagcactttgggaggcagaggcgggtggatcacgaggtcaggagttcaagaccagcctagccaatatggtgaaaccctgtctctactaaaagtacaaaaattagccgggcgtggtggcgggtgcctgtaatcccaactacttgggaggctgaggcagaagaatcccttcagctcaggaggcggaggttgcggtgagccaagactgcgccactgctctccagcctgggcaacagagcaagattttccctctcaaacaaaacaaaacaaaacagaaaaacaataattttaaaacaggtagggtgacccccatttactccttggagatctagttgaatttatattgttcttccaattctcaggtctgcagaatttaaaactctccccaaggtttttacagagtttccaccttggatgttctcctggtcccctctacctccagctcccgtgctgtggtcattgctgcccttcaacccatatccgtcataataagaaacttgggctttctaccagtttccttttaaaaatccacttgcatgtgtttgtagagtgagctcagtgaatgctggggtatcatgatggagtcacactgcctttaggtctttacttggatttctgttttccccctcttctcccatttctggattaagccttctctccataactgctctcttccctccttcaccttttttctgtctgtctccctcctttccttctgttctcttctttctgtcagtgtccctttctctctctctctctctctcacacacacaaacacacacacacacacacatacatctcttaaaaggatagtgatactttaccagttgatttacaaaaatttaaaagcaattatatatagaaattagtcagtgagctgcatggtgcaaatctatattggtctttccttttctttgcttttgatgaccaaagaatagctatccaaagatagctttgggttgcagctgctgccaggtatcatgcagtctggacattgggcacaatgtgtcagcagaactgggggtgatccaagcagcccgggaaacaaagccctgcttgtatctctagagtgttctttcccctgaagaggcccaaggtccctgagagctcagcatagctcatttctttattatctgccacagtcttcagtctcctctggatgccagaggggagcagattggatttctgggagagtcaacaaatagaagttctaagaattaaggcaggccgggcatggtggctcacacctgtaatcccagcagtttgggaggccaaggcaggtggatcacctgaggttaggagtttgagagcagcctggccaacatggtgaaaccccatctctactaaaaatacaaaaattagctgtgcatggtggtgtgcgcctgtagtcccagctactcaggaggctgaggcaggagaattgctctaacctggaaggcagaggttgcagtgagccaaggtcacgctactgcagtccagcctaggggcagagcaagactccatctcaaaaaaaaaagaaaaagaaaaaaaataagaattaagggaaagctggctcccaggcaatgggatggagcagaatataggggcatgagatggagaggctatgctgtctttctcccttttgatgatgctactggggaaaagtatcatcatcaaaatgtggaagggaaaccaaaaatgaagggaaggtactgaagagaaacaaaaatgtgctgaatccactcttaggaaaatgactggtctttttccttgctgtgtattcagagcatacctactgctagagctactgaatctgtgcttctggagtggtttggccatttgcagctccctcatttgaggactaatattgccattctgctgttctaagcagccattatctgccgcccaccccaccaacttgataccccattagtgttagggtacataacagtacctcagccaaggacttgagtacctccaggcaagtcactcactcaacattgtggtgtcttcttcagtgatagaatggaatacctgggcaatcccaggagtcccctccacctcaaacaattcagttcttctgtggttctacacttatgattcttttgatgagagtattcatggctgttttctcatttttatgtcactaactatcactggaaatgcattttaggtttatcatcattttacagtctcaagtttctgtttttttttctttattttataccaagacgcaaatgtgaaaaaaaaaaggaaatagaagtattacaaatatcttagcttataatagcagaccaaaagtaattggaagaaacatgagatgagaaagtataaacatatttttaacataactctgctgttctactgataaacaatttctgctgctctatttgtatagagacaatcaatatattttttagaggcaggaaaagatctttttttttttgtcagatgaaatgttgctttctaaggatagtcaatcggtgcccttaataaacccatcagcccttgtgtcttggtatagcattattggtagaggtaattatagaagctaatatttggtaactaaagaaagaaaactaaagaaactaaagaaagaaactaagctaaagaaaggaactaaagaactaaagaaaggaactaaatagctgaagaaagaactaaagaactaaagaaagaaagtaaactgggaactaaagaaagaaaaatgatgtattcaaagggagagcaagtccctcccaccatcgtttgatctatcaggtgtgatttgcctgctggcttacatcatggaaattttacttccattttttaacaacatagctgggagaacaaagaatctcaaaaacgttttagttgtagagagggtttactgccctgatgaatgactgatctgtatttctgaaaggaatcttctgcctcttatcatgatccagtcttgtattttttctcatggtgacagtgatgttgtacctcatgtcaacatgaaacataatttttcccaaacaaacttttaaagatagggaaacaacattgacatgttctggtttggaattgtatcagtgaattaaggaatggatttaaggaaagatcattagaccaagagtcaaaataactctgtggtccaatcctgcatagcttatagtcctgagatcacaggaaattcacctaagacaggatcattctagtaccatggagatttgcctggtccacctcacagggctctcatggagatccatttaagtgaaatatactaactaaaggtaatcattttcttatgaaatatcaaatatatataaaaataatatatttattataaaacaataaaaatcccattcactaatcattattgaatacacattttaaataatcatttgctgaacaaatataaagaaagcatgaagcctaggagatggtggaaaaatgacttatacgcgttgaaaaaaaaagcatcaagatgtcaatagatttgagtagctaactaaattagatataatctttgatggataaatgtaaagctatagacggacgatcaaggagtaatgcatgaagatgagatggcctgatgcacacttatgagcatttaagtacaagagaaatctgagccaagagaatgccccaaaagttcctgaagttctggtaagtgctgatggaaggggtgacccacagcctccacctggagtttagacatcccctttagctgaacattgtcctctcctgaaagtttgctgaatagtgaatttggagatagcaagaacctttatctctgtatttttaatggaagaagaattattcaaaactccaaccaaagtcctcagtatgttgaagatactcttaaatacccatataacaactattcatgcacacataaagaatttcatacatccattgccctgttatttaacacttaaacttgttctttgaaatatttgtgtgcagaagctgagcagtatcagagacaaattaaattttcatttcataacaaacatctatctcaatatactttatcattccaacttttcttctaaaataatggattttcaaggcctttaaaactcactgactttcttcaaaggctttttgacttccgtaggagacatatttacgtaaaactatgaggggaattgagagtgataatgaaaaatccatctattaatagcaagcacaagcaggagatgcttgttattagaataaaaacacatagacaattgcagaacactctgcttcctctcaccaggtctggcctgcaattagacattttcactgatgtgtataaatagagtggggtttagagtttgataataacttttaggtaaaatttattgtatatcattgtagcaaacattcgtagaatgagagtacatatagtgaaagatatatacattgtgtcagtttgtgtcactgggaaggattcactatctgccttcttaatgtgacacagtaattcaattaattgtgtaggactccagtccctggcacatagtacatgttaaaaaaaaatttgctgaattactgacagaagggggaagaatatagactactgcattggggttatcagtagagagtacataaagaaaaatgtttttaataattaaaaattctagttagaaaataaaaaaggagatagtgtgttctgtgtctctagatggacccttgcaggaggaggaatattttaggaatttcgctgaacagattcatccctagttggatttttagatgcaataaccagaaaagatcctcccaccaatccaaagtctctgattatctgttcaagaatttgtatatcccaactctttgtgtagttaaaaattataaatcaaattgctctttaatctagtttttatgtcaggaacaaaactcacatttcaatttagaaattttgcaaaggcctgttttccattgctatcatcatttttattattgtcttaacctttacttttaaaaatctatcattttaacattataatcattagaagaaatgaacgtgaactaaaatgtatgtattttgtttcatttttaatttaaccatgtcttttacaagttaatgaggatattaatttttcaaatataatttttagtttctttattttgcctaaaatctaaaaataactaccatataaaacaaatattatcttgttcactcatcttgggaatattcttagtacaagaatgtgtttatgatttaattgatgaagaatgtaaatatacatctacacatattcatatgtattaattttcatgtattatatatgcataaattaccttttcaatgtacatatgtgcatatattttgtgtaaatgtacactctgtctatcagtaaatttgtagacatgcctatgggatttgcaatctagttaagttatttcttactgttacgtacttttctgttttacttatggttaactgatgcagggaaggcagaggcaagggaccctcattttggtatcctatttgggggcctctgcaatatgtgctttctggagcctggaccatgcatactaagctttgtggactatcagaggtcctacaagcacacaatatttaaaattctataagatccatgtctgctgagtacttacctgagtgattcacttcacgaagacctgaaggaagtcaatgcaacatttatgtttccattctctctacaccagtgagtataatgttcttaggaccagtaaacattgggatcagccatatgttgggaagacaccagctagttcaccacccatggtacttagacctattcttttttttttgagtcatgattaatgaatcctatcatactggctgtcagaattctttggattcaatttgtagatacccttgtccatagactcattaagacaattttcatattagtgtgaatcaacatatataagtaacttgagtaactcctcccaagaatgcccttctacttttagctattagatcctaaatatacaaaagttaagaggctttatagaatacaactgcaaattttatttcttactatattctgttgaatttttctcagtttgattttttttaaaaaatggcaaatataacaaaccccaaaacagtggagcacttctatttcattgtcaaacccaattgacaaaaatttgaagttagtggaatttttttgaaggaaaatttatccttgaagtcatcaactattgtaattcatgctttagaaaaacaagcattaggactgaattgtattttcttttaaattcatttatgttaattattgtaaagaaattttcccactctacttttgttccccatttgctgtttgttgttgtcgtggtttgtttgcttgctttggagacagagccttgctctatcccccaggcgcaatcttgcccactgcaaccttctctccccggttcaagccattctcctgcctcagcctcccaagtagctgagattacaggttcctgccaccatgtctggctaatttttatatttttagtagagacgggttttcgccatgttggccaggctggtctcaaactgctgacctcaggtgatccgcctgccttggcctcccaaagtgttgggattataggtgtgagccaccacacctggcctgtctgtttgcactcctgctgacagcaccagtggattgctattgtgtttttcagagaggaaccaccaaatcagaactgttagacctcaaacagttgtttttgacacagagtggtggaagggagccactcaagaaaccttgctttattatcttaatgctctcaaagcaatctttgtcatttcctttgaatagcactttgcgagtttcacttgacatatggcatggccctcagggatataggcatttgcttttcagtctaaacaaaaatcaagtttataatttttatttttgtaacaatttatgtcagtattcatcacagaaaagcatattcctctttttccttctgacttacattcctcctcaagctacctgtaagtaatgatcttgaacagtacacaactgacaagtgtttcctgcgtcgaagaatggttgagtgtgtgagtgtagaacaatagaattatagtttataaatactgggatttcaggactaatgtaataaggagaaaccatccttcctttttatagctttgagggaattgcaggaacaactactgcagcttacagtagaacataactgtttagaatgccttttaacaattagtatttagtgtctcactttatttctaaggccactgcacgtgatacagaagcctgatgacagtagcatccacattcttttaaaaatgtgtaaaataaggttataaatgtttacttttacaaaaattcattgattccctcctttattcaataaaatgtatcaagcacatactacatgataggctctgtattaggtacccatgtgcaaaatagacgtttcctgcccttgagaagcgtacagcttagttgagaaatttactagtcacataaaaccacaaataaatgtataaggtaagctgtgatactgctattatgaagaggcacaggatgctgtaagaacacataaataggggtttcaatgaaggcttgcttaaggtgttaatattagaattgagctgtaaaggatgaaaatgaattgcttagatgaaagaggtgacaccagagggagcgggcagggaaagggggagagtgttccaggaatgcagagagacagtgggaagaaatgaggtcatttaagtggccaagccaggtcaagctgggcttgttagtcactaacatattttgttttttatcctcagactataaagtatggaatgaaataatcgtatttgtgtacttaaaaatcactctggatgctatgaaaatataatgacattgagtactgctttcaataagtcacagtggaatcttgcaaatatttaaaataagtcaaccaccaaaacaagaattgtatttgagttaacagcatgtccacagaagggtttaattggattagagctttgaaaactgtaagtagaaacacaaattgcttcagagaatttataatcctggaatgatatttcccatgcccagagagaaacccattcctcttgttactgtcttcagaaccacagagcatgtcattaaatagcagcttagatggctgtgcaggcctactagggtgcagatggattggataggggtcaggttgcattggagtttcttagaagcttcacttcacctaacgttggcaaaacagctggacctcagagaactgcatgcacgaggtaccagatacacgaaaagaggcaaagcgtgacacagtgaaataacaggtactgatgttgagacttgtgaggtggcgcctggtttctagaccaggaagttttcttactcatctcttcttacaatgggtgaggcaccgggcacacatgagcgtatttaactttccaacagccatgtgaggtatagagtgtcagctcctttttaataagtgagaaaaatgaggtttagagaatttaaatactaatacccaaagtcatacggggcatgaggacaagattcagactcatgtctgccagctccaaaccaggatttatctgagcttatgtcactcatttaaaattggtatttgaattcgtatttatttttgaaggtgttcatacaaagaaaacaaaaagaaacggagtctggattgtagaaaacatataaaacctatatcaaaaatcatctaatagtgatagatagagaagtttcatattgaaataagcttttagaaaactgctctggtaaattaattggtacaaactaagaataaaaatgggatggttagcatagcttgtttgtcacaagaaacagaaacttcacctgcctttttccctgtgaagtgttggtgcagtgacaggattcgcctctcttattaatagtctgtcaaaatccaggaaaatcatgtgatgcttcagagatttttctactgagtgaatatatttgattaaacaccatctgcaaaaatcctcatcacccaagaaaataacagatcgtagatctaacacatgctttacatgtgtcaagaaatatgttggtcaaatcaagagataagcacataggtttatctgaagtccaacttaaaacagctgctttcaaattccttgctaagccaggaagcttgactgatgggacccagagtgatctccctgtctcccctcctagctgtttcttctcacctctgaagttactttttccacattgagggggcctttcatgagtaccagggagaatgagtcaattgagttcatgcaaaaaaagaatcccatcctttcaagaaaggagggagaaaagaggagggaaagaagatatttaaggggttttgctattttatctggcttaagttaaacttgtaatgtcaaaaaataaagtctgaggaaaatatgagtaaattttatctttccttgaggtggatcctttttagtcattggagcaaagtcaaaaactgtaacagaaaatattgataaatttaatataaaaatgttaaatgttattgtgtcagatgaagataaatacaattaaatttaagtgacaaactggaaaaataataatgacattaattacagaataagtatattaggtaaataaaagctcatagtttagtaagaaaaagataaatgataggaaaaaaacgaacaaaggatatgactaggcaggtcacaaaagaagaaataaaaactaccaagaaacatttaaaaacatttcaatcttgttggtgttcaaagccacacagatgaaaacaatatttttgcctatcaaattaatatatttttacaatgtaacccccattgtttatgtaatgaaaaaggcacaactttccttattggcaagttggcaatatgtcacaagtcagtataatgtctaaacttatccagtaatttacctttgtaaaattgttcaaaagaatacttggacatgtatgcagttatttgtgctacataattatttataatggtgaaatatctttaataaatgtaatgtccaccaatagaggattggctacttaatttatgtactctgccccgatagtaccctgtaaactcagtttttaagtctccacaaatttatgttaatttttatcattcattgattcaataactaaatatccattaagtgcctactgagtgtgttgggtacccatgaagacacaggtgatccagcagtgggcaaacagaggaaaattcttgtcatactagagaaccaaatgattcaatgacaatgagtaaagcatgttttgcatcagatggtgaggagtgccattgagaaatgctgagcaaggatggggataatgctagagttaggtggaggaagggacagtgtgattttaaatagggtgttagggaaggcttagtgataaagtgacaagtgattcaaaactcgcctgatatgaggaacagaaacctgctgatatcagagagaagggcatcccaggcagaggaagggcgcaatggaagccttgaggggagagcatgctggatgtgtttgaataacagcagaagggacactgttgctgagcaaagagaaccaatggcagaatagcaggagaagaggttgcagagaatgaagagaaccccataggccattgtgaggatgcgggctttttactcagaaagggatgggaagctgttggagggcttggttgatgaagtgacattattttacttacatttcaacatcatcactctggacactgtgtcaagaattggctgaagggacgctgtggagccaaggagaccatttaagaagctattgtaataatgaaggaaaaagatgttgggaatgtgagctgttgtagtaagggtggagatagtagggaagggtttggttgatatacttgaaaattttatattgtttgaatgtcttaattttatttttaataagcaatatgtttacatgattcaaaagtcaaaattattttaaaagtgcatacacacagtccagtccttctgaatcccattttattaattacctatttgttcttccaatggttctttatatgtatatgtctactcctgtagggtgtgtgtatgtgtgtgtgaataaaggaaggcatcaaatggattatgctagcttttgtctccctttcttacccaaacatgtttgcatatgatataaaactgcacagtacttacttttctcacctaaaaatgtatgattatattttgaatatagagccaacaggactttctgaaagattgcattaaaggtattaagaaggagaaacatgaagtgtgattttaagtcaccggaagaagcgtgttgcctttgggataattgcttgttcagcatctttcttccctgacttaacgggagagaccatagctagatggttcccatctacttcagtaaccagtaaatgttagaagccgcatatttactgttgaataatgagtgattgataggataaatattgtatacataaactaaaagagaattcaagtagcaggataaaatttgttttcatatatatttaatgttttgagaaagtgcttctaggactttggtgaaataaatatttgctctgcttatagaacgtgctgcagatacacagagagtatgttggtatctatactttaaaaatttgctgaaagtacatacacaagaattttaatagtagttatctcttggggttgggattatagatgactttttttttgcttcattattttatgtcttttctgatttatttattataaacacattttttatatttttattttattattattattttttaagagacagggtcttgctccatggcccaagctggagtgcagtggcacaattatggctcactgcagcctccaactcctgggctcaagtgagccttcctcctcagccttctgagtagctgggactacaggcgcacaccactgtgaccagtgaccagttaattttttaattgttttgtagggataggatctcactatgtttcccaggctggtcttgaactcctggtctcaagagatacactcactttgtcctcccaaagtgttggggttacaggcatgagccaccacactgggcctctactgtagacacatctttataaaattaggaagaagtgaaaaaaaaaaataagggatgtgatcccttatgtgaaattttgtttttcctaagttgaaaaatgatagaacaatgtgtaatgtgtacaagtgacaacaaaataaaggagagtttcactacttcttaagataaaccctggagcagactacctgaaaatattaggaaattttcactttagagatgcgtgagatcgggcagccagaaaatgacacagcaaggaaggactcctgtcatttgatgacactcatagtctgtcagggcattaatcagggtatagaaatataacatctgtcacaaattctgtgagatgttcttgctgatttcttctatatacagtgttattttgacattctgtatataaaatatggcactttttatccatgatcagattttcaaaatgatatctgtgccagtgacctacatttttgtctcacttgacaatgacttggggctctttccctattagatcatatagggaatgtctacctcattctcttttttgccattttcatggtacgatttatattatataatagggatgtgctataatttatctggtgtcttccatattggtagacaaatatatttgtcctcattttttactattacttagaacgctgtaattaatgccgcaaatattgctcaaatgtaatttctttacgatagtttcctagtattggaattgttgaattaaatagtatatgtacttgaaatttattcattacttcattcaaacatgcaacaaattttatgaaacatttactcctacgtcagacatggttttagaattagagatttagtcatgaacaaattaaaccgaattcctgtacttttgcagcttaaataccagtggcaaaaccagacaatcaataagtaaacgagtatatttttgtgagtatgtgtgtatataaaatatgaaaagagagatacagcagcatagcatcaaatagtgatgagttctctgaaaaaaaaaaacagcagggtttgggaatgaaggacaacgtggctgctgtcagttagggtgctcagagatggccaatgtgaaaagatttgacagaggtctggatataatgaaagaatctgaatttctggggtggggtgttccacgtgaggttctaaggcagaatcatccttgctgtgctcagggatgagtatctggagtgcaatgggcagtggaagaggattggggatcccagtggagatgtagtcaaaggctggtaggaaataccagtggagaggaaggtgggatagtagaaacgttggattttactctaagaatgatcagaactcattggattgttttgagccgaaatgtgacatgatctcatttgtatttaaaatataattttggttgcttttttgaaaaaatagactataacacagcagtattggaagcagaaatctcattggagaggctaccatagcaggctagacaaaagataagagtgccttggagtaattgttctaaacactttgggaggcccaggtgggaggaactcttgaagccaggagtttgagaccagcctgaggtacatagcaagactctctctctacaaacaaagttttaaaaaaagattagctgggcatagtagtgtgtgcctgtagtcttagctacttaggaggcggaagcaagaggatctcttgagcccaggaattggaggctgcagtgagctgcaatcctgtcattgtacttcagcctgggagacagagctagaccctgtcccctcccacaccaaaaactaaaaatcatttaaaatgttcataaattcagccacattgtcctccaatatgactttatcaaacctgtcttttgccagcagtatatgaaattctccttcccaaatcctcaaaagcagtgggtctccatcactttttttgtgctcggcatcatacttggcgtagagttggcctttgatcattatctgttgaatcgatgaatgaatttaagtgtcactattttgatgcttagcgatataaacttgttttgatttgcatggtttgaacttcaagatcttttcttacactgcttagaaacttgtttttcttcatgaaatacctgttcatgacatttatttattttgctcttagattttcttatgtatatgttggacttcttgatgttttccaggtattataactttgttatgtgttgtgtatgtggcagtatgtggtttttgtagactttatttttgtgtctttgatagtaccaagttgtagattttgatggatacattttatacatttttggttttgtgatcattttgggaaagttagcagtctttcatatccaatattttattctcactatttggttatatacagatagaaaaatgaagatttagcatgtttaagaaatttaaggacaaacaagttctgtgaatctcatggtcagccctttctccaaagggttgatttttcaggtgtgcttcatcatgtaatatgaaaaaacagaaagtagtgtgactggggagaatggaaggatagtatatgaagcatgattacaattttatttaatattaaaaactaccttatagctagatgtatggatgattttttattttccttatacgttctgtaatttccattttttcgaagtgtatgctgtgtgtgtgagagtgtgtgtctgtgtgtgtaatgagacattaaagtggccctagtccagcaggaaatgacatgtctggggcaacagggtagcaaaacttcagataaggaaatctgaaatgaacagatgcccaggcttgaacagagagtagaattaagtggtttttcattggaattatggagggagaatgaaatttctgaaaatcataatggaatgggaggaaaaaaagtaaacatagttaaaaaaaaaaacgatcatttaaagaagactaggaaatgagtaaaaagactgagggaggaaggggaattctaagtgaaacgataggggtccatatcacattgcatcctgttaaagctgtgtcaaaagtgtatgtttcttggccaatggagtactggatatggaagacatcttctagttagggcagcaatacatgacagacatcgataatcagtcagagccctccttcacttctttgctaagtcttcacagtgcaggtcttaagtaaaatgtgtcagggttgatgctcaaacataaactgtgtcccgcgtaactgtagttgcacgccctcattgtgaatataagtaagacagagaaagatcttgtcctcagtcgtccagctctgattatatctacctttaccaagtacatttcactatgattattttggtgctcattatccatttgatttctccttggatgattactttgtggagcaacagaaagagcatttgtaggatgactcaggaataaacctgttgatatagtttggttgcttgtttccgtcaaatctcatgttgaaatgtttccccaatgttggaggtgggcctaatgggaggtgtttgtatcaggggggtgggtggattccccatgaatggcttggtgccatacccatggtatgagtgagttctagctctggcagttcacaggagagctccttgtttaaaggtgtctggcacctcctcttctctctctcttgctccctctgttcccatgtgacatgccagctccccctttaccttctgccataagtggaaacttcctgaggctctcatgagaagcagacgctgacactgtgcttctcatatagcctgcagaaccgtcagtcaagcaaacctcttttcttaataaattatccagtctcaggtattcctctatagcaaggcaaattaaccagtatacctgcattgagttgcctccaggatgactggcctatgtgtccttgattgcttcatctgtaaaaaggcatgttgatactggacttactgggtagataaatccccattgttttttgatctatgcttctatgattcttatgagactgcaaccctagaataaaattttggcaaaatgatagcaaataacacagccatttataatggaaaactagagaaatttccatttaataagtcaaaatatgattttagagccagcatgaacacacatcagccatttttcacttctgtaataatattaatgtctacatttatttgctgtatagaaaatagtgctcattgcacattagttttttgagattcaggaaaaacaaatcatcagcactctttgacacttaatccatctcaatgtcattatatctttgaattaagttattaattacccttaattaaattcattttaaatggtggtgctttcattcctaagtgcttattttgtaattcctggaaaagtcataaattccactcagtttaacaaatattaaaatcatttcatgcaaggtatagttctagatattttaggtaaccactaatttcatatcccttggggtaaaaaaataaacatgcttccatctcttgtaactataacttctgttagagctttgctcttggcttatactttctggaagaagtaggggttggcacaggaatgggagaggaaatgatctcaatgattaaaagaaggatttgaccaattcctaagggcaagcaaacatcttgaagtttaaagaaatctcatacacgtctttctatagggagcattagatgatggataatgggctgtgttgccaacataacttttacattagatggtgtaattaatttttcatgattttgtttattgagactatgtatttagaatgaaattatatcagaaataacctagtgcaaggaattattcaaggccaaacttaagttctaatatgtttggtatctagcggcctccaggcatagcaggtatacagctaagaggcatggagcaatttcagtttctttaggcggcttttctctcaattatttctcttactttgtctttgagagacgcaagcaatctccagttgggcccttgggacaaggcatggtggccaatatgctaaatggcagctgatccatacactgtttctttctctctgtctctgtctctctaaatacaaaaaaaaagttgaaaattaaaaaaaaattttttttaattattctatttacctactcttgttatgtaagtgtggtatgtgtattacctattggcttcacttttaggtcatggaggacaatgatctacatcctaataggtggttttccagttttcctcagagtaggaaagattgtctaggaaaaatgaaaaataggagatgaaggtgaatgctaactcactgctctttgtggagagtgctctacacattatcattattattgttatttttcgagacagaatcttgctctgtcacccaggctggagtgcagtggcacgatctcggctcactgcaagctccgcctcccgcgttcatgccattctcctgcctcagcctcccgagtagctgggactacaggcacccgccaccacacccggctaattttttgtgtttttagtagagacagggtttcaccgtgttagccaggatggtctcgatctcatgacctcgtgatccgaccgccttggcctcccaaagtgctgggattacaggtatacaccttatttaaagccacaggagatgagaaagaagtgatggtctattcccaaaaccttaacaattatttctcctgaaggcataatgcatctttaagtgctaatattttttaaactgcgatagaagtatttcatgatgcgaaacaaatgctgtctaatggtgtggggctcataagtattttgcagaaattaagttgcacagaacatcccaggcatttcctgtagtagccacaaacaggtgattaggttgcctggggaaaggacatagcaaaggctttggttggtgacttccttgagttgcctggattttgcaaacagtggtgcactcatcaaatttttactgcagatgtgtgtatatgtgtgtttgtgtatatgtgttgataaaacgtgttgtattaattaatgaattctttatgaataatagactttatttttattttttatttttttttttgagatggagttccactctttcgcgatctcggctcactgcaacctccgcctcccgggttcaagtgattcttctgcctcagcctcccgaatagctgggattacaggtgcctgccacaacgcccagctaatttttctatttttagtagaggtggagtttcaccaggttggccaggctggtctcgaactccaggtgatccacccgcctcagcctcccaaagtgctgggattacaggcatgagccactgtgcctggcctagactttatatttaagagcagttttaggttcacagcaaaattgaaaggaaggtacagagatttcccatatacctactgcccccacacatgcaccaccttccacattatcaatatcctccaccaaagggatacatttgttattattattacccagaatccatagttgacattagggttcactctagattttgtatattctgtgggttttaacaaatatgtaacgacatgcacccaccaatacagaatagtttcattgccgtaaaaattctctgtgctctgtctattcatccctctccacccccaaacccctggcaatcactggtctttttactgtctccatgcatttgccttttctaggaagtcagagttggatttctacagtacctagagttttaaaattggcttctttcacttagcaatatgcatttaaatttccttcatatcttttcatggcttgatagaatgctgaataatattctgttgcctggatgtaccaccagatataggtatcctatatctggattccgactgaaggacatcttggttgcttccaagttttgggaactatgaataaagatttatttggttatgaatcaagctgctataaataaagaaatcaagctgtgttttatgtttcaatttcaaaaaatctaacaatttcatagaaaaatctgcatgcctttttctttggagaaatcacaaaagaacagtcagtaccgggaggtctgcaaggcaatccacagaggctgttgaagaatggcatggactttgcgtgggcctgagttctgcattcacagtggctcccatcccagtccccatcctcatacatcctgctcacacacacttgactcttcatgacacctccttatactataagcatttgagtttgcatctcctagggagatgggaactaattggttaattgttattttaagggttttgccttgccttcaacaaccctgggttcttggtgcatagtttgccctttatctcttcagttaatgttgctaagtcaagatttttatttggctggggggacggaaaggaatgagggtatgaatctatattattatagatagattgcattatatgaccccatatatgaccccagcatcttagaccctccttctgccaccttcccatgtggcagagccaagacccttctgcagctggtcctcacttctctttttccctcttgccacatgctcctacagcctggtgatccctgtcccatctcttgccaaatgttttgctctgagctaagtgagtaactaagtttcaaaggaagctaccatatttaatacagtgcatgaggaagaccaatttctgatttttgcttagccacagttttctttttcttttttttgttttaacctttaaaaaaaatgtggtaaaatatatataacatttatcatttaaccattcaaaagtatggtttaaccattcacgagaggcattagatacattcacaatactgtgcaaacatcaccactatctatacccaaaactttttcatcatcaacaaaatctctatccattaaacaataagtccctcttctttcttccttccctccccaacatccccagccttggtaacctgtattctactttctgtctctatgaattaggatgctttgagtgttctgggatctggtcctcactgtcagctaaactctccaagtaatcgtcactgcaatattatttttgttttgttttgtttttctggagttctgagagtgaggaatccattatcaatgacctatagcatgaacatttttgtgggggaatgtgtgtaaaggtatatagacatgaatatttgatgatctgacatcccacggtttaaacctagatggggcttctgtaaatatgaactcaaggctttaggagcctcccaagatctgacattccaagagtagagaagaatggagagacacccatgatggaattatctgttgcagacaagaacacaaagatagctttcttcatttagaactaactttgaggactttacatagacagaaatgttctgtctccttttttttttccagttacagggaatgttttccacttgtggtccctaaaaatgcagaaatatcatagggagtgaaagttaccttgtttctttaactgccgcaatctggcctcactcaacatgtagcaaatgccagaatgatagatgatagattatagtgatgtcgccctaggttaacagtctttctaggtaaggtacttctatatctgaattgaaaagtagggcagctattgcctcagatttgggattttaattacattgtttccacgtatgatattctttctaagaatgtctctagcacttagtctctgctttatacaatctaccagttaattatgtatttatgatgtaagtaatttggaggcacagagaaaggcagtggggccatttctccgcatggtcttggtctgggtgcatgtgccacatgattcacattatttacataaggaatggctttactgatttgaactggctgagtttgcttgcttttaaaactgcaacaagccaggtgctgtgccatgcacctatagtcccaaatgctagagaggctgaggtaggaggatggcttgagtccaggcgttttgagtctagcctgggcgacatagcttgagcccatatctaaaaccaaaaataagtgataataaataaataaattcaatttagatttggtttccaaggtacaactgtcaaacatctttttaaatgcaaatatttcatgtttcattttaacctaaggttgtgtcatccatttaaaatactttacagaaattggcctaactgcttatgtgtactgcttgatttgctttcctctttgttgttgtaagaaaaatgtcccactcactagtctggattactctgttgcaaaattaagggatctgaaacatctcaagctttaaaaatgtttgagcatagcttctcactaaaataatgagccctgtgtatctattgcaccgtaatctctaatatttaaaatgataaaggacttctagttcaaacccattattttcaattgagaaaattaaagtccactgaggtgtagtcaattgccagctagtgagtcaaggaagtgttaaggttatcgtcttatgctagatagagcctgggaaaggaggtgggtcttggaaatttgcggttcataacagggttgtctgtggggctggcagaaaggtagaatatgactctgtggatagagatcagggaaaaaataaagactgcagatttggggctgtatccatgtataggaaacatgagcctgacaaaaaatagagatgcagaatgagggaaggtgtggtcacttctgtaaaaatctttcaaacactgatttttgaacaattcattgctcttctgcagttgaaagaatcccaaaggaatgacacctgaatggaaaacctccaaagatcccttctggttggaggccctgggtctccaattgacccttcaaatatattattctgttcttttgtgcatttctctttttattgcaaagaaagaaaattaaaactatcatgaatgtatttaaaaattttattagtctgaacatgaccactttattgattactttattgattatgacattctttttttttttcagacggggtcttgctttgtcaccaggctagggtgcagtggtacaatcatagctcacactgtctctcaaattcctggactcaagcgatcctccctccatagcctcccaaagtactgggattacgagtgtgagccaccatacctggctgattatgaaactcttaaataccactcacacacatgacttaaggctatttttgatgatgtacagtagcactgtatccattcctggacaccagtctttgaagagtgtttggctctgtcccatatatacctattgatacaatgttttgagtgtttatttatgatataaatatatttatatttttataagtaatatacataattgctataatattaagtatcatgtacattatagggaggagtctcagaagtaatttaaggaagatgtatttgtttgtctccagcctgagtggtgcaactacatgagcttacagcattccttgaattacagatggctcatacctggggatacagattagcctttcctcctgtgaactgaaggcttccatttgtctaggtactgggtagagataattttagtgtctctttgaggaatattatctttagcaaacttgttttctctcttacaacctctcctttacaccatttgttaatttttttttttttttttttgagacagagtttcgctcttgtccaggctggagtccaatggtgcgatctcggcccaccacaacctccacctcctaggttcgagtgattctcctccctcagcctcccgagtagctgggattacaggcatgcgccaccatgcccggctaatgtttttttttgttttttttgttttttgcatttttaatagagatggggtttcgctgtgttggtcaggctggtctcaaactcccgacctcaggtgatccacctgccttggcctcccaaagtgctgggattacaggcctcagccactgtgcctggaccatttgttaatttaaaatgacacatttatggctgggtgtggtggctcactcctgtaatcacagcacttcgggaggctgaggcgggcggattatctgaggttgggagttcgagaccagcctggccaacatggcgaaatcccatctctactaaaaatacaaaaattagctgggtgtggtggcgtgtgcctgtagtcccagctactcaggaggctgaggcaggagaattgcttgaacctgggaggcagaggttgcagtgagccgagattgcgccactgcactccatccagggtgacagagccagactcagtctcaaaaacaaaaaagacacatttataatactagtaagggcacattcaatatttaaaaagaatctcatacagttttcatttttgcatattacttttcagtatattcattagagtcctaaaatttatactatcttgtattgtactcttttgacttcagaatgtcatcaaaaaatttgcttctgttaacaatataatcctactttcaattgctttttaataatcttgggtactttgagactgtaatttagctagtctccaaatttgggacatatatgagatttttttttttttttgccatcatagagaactctacatgaatcaggtttctgtctttatccttcatgcttctgttgcactatttccttggtgtgacatgccgtagtcaagaagtagaagcatgtattcttgtcattataatttcctatttttctgtgaacattttgaaatactgggttggtgtagctcttagctgtcactgtcaaatcacccccagtgtgagcccacacgttcaagattatttctctttttctcatttcaactctgagttagttccaggatatggttgtatctctgcaagattgtcagctccactgagtgcctccactcacatagatgagtggggtccctgcccagtgcttcaggtagcagttcttctctacacaatcaatgatgttaccactgcatgaagctccctgaaagtgtgcgtatggagtagtcctcgcacacaggctgaaagacatatctagctatgttgggcaactagtcccctcagaaaatgattgcctcaggaacaaatatttaagttgaattgttaagtgtggctgctaccatcgtcaatggaagagaaccaaagcactcgctattacaaaggggcctctagtggccaaaactctcagctctgaacgttgttcctttgtcctcctctctacatcctcctgagagaatggtacttcaagatttcatagggcaaatctccaacttccttttggaaaatacatgctttaccaggacgcatcatctgtccacgtgaggaacaatggaggagaccataatactctaaatctggaatatgtcagttgacctgaatgccatggggagattcagctgaccatataggataagcagggtgttgtggtctcttttgtgttgctataatagaatttctgagactgagtaattcataaagaacagatttatttatattgttctgggggctgagaaatccaaggtcaaggggctcacatctggtgagggccttcgtgtgagggcatcaccccatggtggaaggacagagggcaagcaaccatgcatgagagagagaagaaaagggggacagactcacacttttattaggaacccccttctttgaaaaccagcctactcccatggtcaagacattaacccattcacctcttttttttttctttttgagatggagtttcattcttgttgcccaggctggagtgcaatggtgcagtcttggctcactgcaaccttcgccttctgggttcaagcaattctcctacctcagcctcccaagtaaccaggattacaggtgcctgccatcaggcccggctaatttttttgtatttttagtagaggctgggtttcaccatgttggccaggctagtctcgaactctgacctcaggtgatctgcccgcctaagcctcccaaaatactgggcttacaggcatgagccaccgctcctgaccatcccatttacctcttaggggtcccacctcttagcactgttgcactggggattaaatattcaacaaatgaccttttaaaaggacacgttcaaaccacagcacaatggcactacaagttagtttccatttacaaatgagcactgaaaccaataagatttgggtaactgatatggaatcacaaaaaaaaatctaacctgaagcaattttacagtaagttggttatactgtcaactagtgtgacagtaatagaattggagtctcaggagaaagaatatctacaatgagttcatctctaggtattttgagcttttctttttgaacttcctctacgagagttttaaagtaagttatccatattttacagaaaacttcaaggattctagctggaaggagaagaaattatcaagtttctaaatatcagatcttactttattcactatttgaagtgatggaaatcagattgcagttcaatttttttttttaaagactgtactcctctcctctgccaaagctcatgcaaagccaggaaaacaaatattgatttttattttctctcatctctttcagtccaacctggttttcagtagtattgaaatcagatgtacttcatattgatctgggtcttgaaccagtataatccctgattaacacaattgaaataaccatcatcaaggtggttctaaagatagagaggaaacagtgtggacgcaatacatttctgctgtttgctgtggcttcctggttctgtgaattatgcattggatcttgggcaggaaaaaatacagccagatcctgccatcattttatgaaattagggtgagatatttggaagtagcacgcccatcaccaacactgtcaaatcattagtccatctgaatgtctggtaaatttaggtagaaatatttggtgttatcattgccttccaatctcgtctatctcaaatgctgtatcaatgttgactctgacaatagtaagggaaggctggacaatctggaaggatgggtaaggcttagcacaggtgaacagctgtatatataaccagaaaggcagggctatcaatttgagtcctctgtctataagagagggtgaactttacaagataaatatgccttatcctcagctgagcacagaagacccattaaagcaaaaaggtaactcaggcaataatcatcatggcttggtaaaaagcagttctgatagacttaatctttaaggcagaaggaggacaggctggtggttttatgagaaagtaatgaatccttttgacaattgtattaagactttatggacataagacctaagtcagagttttaaaaatggttctcagagacactgttttggctttgttcttagtcacatcccttcattcaggttagctatctgcctgccctgcaaagcccgcctcttttgtgaagcttttcctgaccacaccagtatctgctgatttatcatcttctctaatctctgaactaactgttcagagggatgaacacagtaaatactaatacatgccgtatacactccaccctctcccggcctctcaagttgtttgtaaactctattttatagttacagtccacccaacagtacaggtggactcagcaccatgtgtgtttaatttgttgccccactttgccagatccatacaacatcaatggtatcatatttatcattgcactgcccattgtctgtagtattctgcagtgcacatagtacaaaacattacagctgaattttaaagaatgatttaacattcaccagggaaattatgaaatacaatccatatgaaatatgtaatccttagcattaggacagcttctttctaaaccctgacttgtcctcacctctcaaaggtcatgtgtaatcctagccactctcaaatgtttttgtccactccaggtctcagcctattagcacatcctagttccctggccatgttgattggttcagaactagttacagtatccaattaaaaacaatgagatttttttcttgaggtatctgagaaaaagatgttcacatttcccggctggatccgaaacctcagagtaggtagggtctggagagcctgtcctcaacttgctcttccccaatgcctgggatgaaacagagtaaagtgaaggagagaaactgattcatgatgattacatggtgcattctacttccctgtaggatgtagagaaagacgattccctactttcctacttctcaagttatatgggtcaattgatttctttttcttttacatctttttcttttctccttcctttcttccttcttaatttcctgccttcaaagcttctttcatttctttttttatttaacttaagcctacttggactgtgatttctctcacttttcactaagagtactactcaatacccaacttgagttgatcctgtttctctttggtacaagagtacaattgtagtttattcatatgttcatagttggacaaattaatgtgtctacagcccaacggcaaactattgatataaatgcagtatctcctgtttttctaaatggtgtccagatttgtagagatacatttgtctatgttgtgagaattgaaagcctttcatgcataacttgaatgctctgtttatgtaagtaatttggcatttcttttcatgtgcaaagggttcctttgattttgaatgcacaggctgtgacactaagcagagaagatgagaatcagaccggggaagaataaatttcctttgtatatgactatacaaagttttaaaactttatctccctcagctcggtatttaatagacattgaagacaggaagtagggagctgtgactggctgtactcgacttttccccaatacagttattcaatttctatatatgctaccctgacaggcttatttcaattttagtcataaacaaaatttacgttttgacttgaagtgggtcaaaatcagtgtcagcattttgttttgtaatatgcccttcacatcgttgtacctttgccataatcagccagagtcagagaaaattatcatccctccctagtgggtgctcaacttaaaaaccagcagagaagatttttttttttgtaaagaatcaacaaagtatgaaaatgaaatgtcaaatgatgaaaattatatgattcaggtttgggatgctggatctttattttcagggacttatttcaaatccaggtacaagtctacagttagttttaggaattttagtgagcaatgggcaaataagttaatgctagtaaaagattgccatattactgcattttgttattgaaatgctaatttataagtagcaaattagcatttaaaaagacacaatttttgttaaaatagtggcctttcttacattttgtattagagctttactttttttctgctttaagcttcacaatgcagtggcagcttgtttcacttgagcgttcttattgattataactgctggtatgaggcaatctgtgcttcccttgtgttctgcctaacagaggttatttctttgcatgatatggagatggatatggaagaatctgggctgtcagggaaggaagtgagagccagagaggagaaagcagccagggggtggagtggtgagcctaattcccagctcttagacaatgagatagctaggagcaaacctctgttcattcttgcctgacagttgtcatggcaactctcaatccagtgacctcttttagttctctaataaacgagttgaatatttgttaagtttttggtttgtttgtttttagtatctaattctctttgagatgatcaagctgcaaactgattccataccttattgattcagactttgtaaaaagatattatgcaaagttgaagatgtgtagatttaaacatttcaatctttcttttaagagaattttctccacaataggaaggcatgtgggcattttatggtcttagccaacataagcattacacttatgaaattggtctagccttctaggctcctgccccagtgaggtccctcctcagttctgtgatcataggcaagtcagttccctgccccagctctttgccctcttccatggcatggtggggttgaaattgacagagtcacatttcccttctgactttaaagctttctgactctgaatacataatatataagtgggtttctctttttgacattacatactgtagtgaagtacagtcctgtaacaggcatctgcagactacagacgcacgttaccatgcagattgctattaatgtacagttctctccatttaatttgctgtggtttccaagactactatattttttattgagaatactaatagcctgtgtgaggtatgaaatgaatacatagtttcaataggactgggttagtgactgttggagaaaatatcttgaattagagtacactgttttattgtttatagctatcagaaagttctcctgtgaggacaataatataatgatctctatcctactatgtgctacactttatttaattggttgagatgaacatatgttgattaagaataaatttttaaaattttactaaatttgagaaaagcaacaaagtatgaggaaaacatatatgccaacaactgaaaataaaaagcaggtgattccattgttttttaatgaagcaccagtcatttccgttgggattagaatccattgtgctaggaaagtatttacagcatgatgctgccatatttgaataaagaagggacgagtggattgcctaaatggggttgaaaccatgtcaggagcacattacaacataaaccagaactcagctgagtatccaataatgttaatgggggcaaaacaagacttattaccatttgaactctatatctgaaatgggaatccgataacatggcagaaataacgtttggtttgggactaaaaacatcctagagtgtatctaagggcttaagtattcatgaattttgtttgtacacttacattatgtgttgtgttagaaaaggcagaaaaaggtagtgcttcatgtttggttgcaaagactcctgcctcagccttgttacacaggagcataacggtgcagtgtgaagcatttaagacaaaaacgttttagagtcagatctgagtaaaatctgagatttcacacttccagcagtgtaacctaagactagtttgttttttttttaatttctcctgaggcaaaattttatttttttctctttcttccatttcattgtaaccttttaaaaattgtgataagatatacataatatttttcagtgcaaccattcaaacatgtggcttatccattgatcggtagtcttagatacattcacaatgtcgcgtaactattatcactgtctatgtccccgattttcctatcatctccaaaaacaactttgtaaccatgaaagaataacttctccttctcctcctcctcatgccacctgcagccatggtaacctctattgtactttctgtctctatgaatttgcctgttttaggtagctcatgtaagtgtaatcatatatttgtccttcagtgtctggtgtatttcactaagcatggtttcaaggtccattcatgttctagcatttttcaagatttccttcctttttaaggctgaattggattccattgcatgcatataccacactttatctgttcatctgctaaatagttgatttggttgcctctgtcccttggctgttgtgaataatgctcccaagaccagctgtacaaacagatattcgagtctctgatttcaattttgtgtgtatatgccaaaaaattgaattgctgagtcatatggtaattctatttttagtgtttttgaggaactaccatgctgtttccacagcagctgcgccattcctgccaacaatgcataggtgttctaatttctccacgttctcaccgacacttgtgattttgtgtttttattttaaataataaccatcttaatggatgtgaaacagtaagttggatttgcactttcccagtagtcaattatgttgagtgtcccctcatgcacctattagtcatcaatatatcttacttggagaaatggtgtgaaagggtatacagttttcaaggttgaaacatgacaataattaggatgattggacaatttagtgaagaaaaaatattattactatagttaacatttttttggcacttattccgtgccaggctgttactaatgctataagtgcatgatctcaatcaacttttactatgaagttgaagactatgaaggtgcctttattatgatttctattgttcacttaaagacatggcatctcagggtcaacaagtatcttggcttatgttgcacagcttgtaagtggcagaaacctgatgcaaattagttctgcctgacttcaaagcatttggctgttaactgctatgccatgttgtctaatgcgtggcttgttgcctaatagcctgtcaatatatgttaaaaatccattatccccaccctcaactgaacccacacacacacacgcacacacacatgcacatgcacattcctcaactttcaagcaccattttcatcctagtataaaatgatacccacccaccccctacccaagattcccaatcttcagtcatctgtcatgtaatttcattcatgtgccttggagaggattccctaaatttatttccacaaagaagcatatcttaattaggtctgttgggagatcattctacatgggtctcttgtatttctgtttctatagcaggagaagcactatgaaatttgtttggattatatgttgaaggacatttgtagagcaaataaccttggagaaggagatactatgtctttcttccagtatattaaagacaaggtttccatttggggaaaaagtcagggcattttcttgcagcccagtgtaaaagatccaggttcttgaagattggaattcctcagctttgacacaaactactaaattgggcagcatctgcctggactgcttggtgctgttgctgccatggaacataaaggggtgagggaaactggtgcaaacatgaagtgcatattacttgtcttttttctttccatgtgcaatgaaggcccagaagtcttgggtcttctgccagcattcatgaaactgtggcagggtcacctgttagcttgcaagtgagataaagccttagactcattactcttcttgtcaaggtctaagatttattagtagccttccatgcacaccaggcagcatgctttacctatatcatttcattcatgcactctgagatatttactgttatcatcctcattattcagataaggacacaatgcctaaacaattaacttactaggctgtctgatacaatgtgttcctcataagtcaaatgtagatcccacagcaacttggtatatagcatctgataacttgaactaaacataccatttatctggctaatacacatgaaggtgtagactcatgtacgcaaacattttgtacccttctaccattgtgaatcttgcacctcaggtgccaatctctttaacttgggttatgagaaattgtagttaaagttggcagtaattaataattttgagcttattccagtttaattaaccatatatatgtaattactggggcattatgaaagacttctgacattgaggaaatagatatgaaagcagcatccatacgcacttgattctcacttgaattacactcattgctcatatgccaggtggggtgtctcacaacaacccacttcttgtatcaaataatgcatgtgttagaatccataaaacatgaatttctaatcatgtaggccacctcttcactggagaatcttctctctaagctttaggctttatatttcaatagaacattttaatacatatctagatgattaaatataagccttccatgacagtgtccaggtgggagaacctgtcaggggagataatttgggagtggagaaccaatatttttggcagccaccactgacataccctaacttgtcttgtcaactgtccttggtttgagacactgagtgtgtggaaattgctttaatgcctttgaaatgtccaaaacgccaaatattacttaaaatgtaaagcctcttcatagttaacaaagagacattaaccttctgctttgtaaactccatgtaaattacgacacaaatgtaaggtattattatactcacatttattgacaatgaaaccttttactaggtgcttttggttcatattgaaagagactttgagagccattaatggatattaaagaggtgtaatttaaatatgtctacataataaaagcatgaaattagaagtatattatctttttatgagatttgtatgtttgtgatggccttatattgaattgcagtcactaatcatcagagaaatgcaaattaaaaccatcatgagacactgtcttacagcatcagaatgactattattaaaaagtcaaaatataacagatgccgatgagcatgcgcaaaataggaacacttgtgcactgttgctggaaatgtaaattagcacaatctctatggtaaaaagtatgacgatttctcagagaactagaaatagatctaccttttgatctagcagttcccctgctgggtatctacccaaaggaaaagaaattgctatatcaaaaagaaacctgcatttgtatgtttatcacaataggaaaaggaaaagtacagaatcaatctaagtgtccatcaatggatggttggataaagaaaatgtgatgtgtgtatatatatctgtcacatttcatggcgagatatatatatcacatttcatggtgtatgtatatattcagccattaaaacagggtgaaatcatgtttcttgcagcaacatattaatagatgggactagaggtcattatcttaagtgaaacaactcagaaacagaaagtcaaatactgcatgttctcacatataagtggacctaaataatgtgtagaaatggacatacagtatggaataatagacactggagactcagaagggtgagagggagttgagggctgtgaaattacttaatggttacaatgcacattatttgggggatagttacactaaaagccctgacttgacccctatgcaatatattcatgtggcataactggacttgtgccccataaatttatacaattttttttaaatgaaaaacctggagctttcccttggctccttttcctggaagctttctcacatcctactgtgtgaaatttggatgcttttgggaacctgaagataaaggctatagctacaccttaaggatgcccaagctgtttctgtaaggagactgagcttgtgaggtttttaatagaaaaatgcgaactaacctagcagccctggacttcatgtttctgtacttttacatgggagaaaaataagctttctatcttgcttaagccaaaaaaaaaaaatgagagaagcattttatttgtaaagatggtgttggggagcttgactgcaatattctgttcacctaatcactaataaaataaatgcaggaaagctaaaagtccacatgagtatcactagcatcagctaaatcaagaaggctggggaggggcagaaaacaatgctatacatttcaacaattgctgatcagggaaacagagacaaggttgaggcatcaatcctattcctggcccgattgctcaagttcactaaagtctgagaattctcaccgatattcccaaatctgaagtgaagtgaaatcagtgatatcccaagctgacctgaactagctgctgggaaaggaccagtgaagtgggaaacaggaaccagaggctaattctctgtcaatgcatcaggttctccagggctaacaggaatagtgttaaaacttaactcactcttccctctctgggaatgagctaaatctcaatactaagcagagtgaatcctgcacagcaaattaaacaaattctcaaaaagggagcagagccaaggtatgccagccatgaatgaattgacagtaaactgagcacttcaacgtggggaatcttcaagaaatgttcagccttcaaaatgtagctggtaggggaaaacaaataagtctcatatgcaaataagtagaaagagagactcacagaaactgacctgcataatgtcatgaaagtgaaaatctggacagcattggcaagacgaaaaggaacagaatggaaactataatcgcaattcgagccagtaggtaggtgggcaggaacaaattgatggaacatagcatggaatctgtaagaaaatgtaacctaagacggaagaaaattttcgatactttatgctaaaaaatacatgaacatggctgggcacagtggctcatgcctgtaatcccagcactttgggaggctgaggtgggcagatcatgaggtcaagagattgagaccatctgcgccaacatggtgaaaccccatctctactaaaaatacaacaaattagctgggcatggtggcacatgcctgtagtcccagctacttcggaggctgaggcaggaggatcgcttgaacctgggaggtagaggttgcagtgagccgagattgcactcctgcactccagcctggtgacagagcgagagtctcaaaaaacgaacaaacaaaaaaaaaacaacaacaaccacaaaaaaaacatgaacatgagttaaactggagccccgtcactcaccaaaaagaacacaacaagaaaaagagatgaacaaagagagtgagaaacttgaacaaaaaatattgaagactaagataatacaatctcaaaatgactaagtaaaattgacaagcatatagaacaaatataactgaaaattgacttattgatatggaagacaggcatatataaccacagccaatgaacatacaagaaaaatataaagcaaagagagaaaagatgatagtttttcagagcttagaaagataagccaacataataatccattgcctatgagacagaaaagcctacacatgaaattgcaaaaggtattaaaatataatagaataagccctgatttatcccaagataatgcctagttagattattttctttgcacagatttaaaagaaaaaatttaaaatttacatacagtaaaattccctttttgaggtgcagttttctgagttttgacaaatgcatagagtaactaccaccacgattagatacagaacaatttccttatcccaaaatttcttttgtgttacccatttatagttaattcctctcttttttcaatctctggcaactgtgtcgctataattttgttacctgttcctataattttggctttttcagaatgtcatatgaatgaaaatgaacactcttgagtctgaattctttcacttagcataatgtatttgagaatcatcctttcatttattaatatgtcttcatatttttgctcagtgatattcaattgtatctttgtttcatcatttgtttatctattcccttattgaaagacgtttatgttattttcagtttccagatggttacacacacacacacacacacacacacactcccagatacatatatatatatctgtaatatatatatatatatatctgtaatatatatatctgtaatatatatatgtgatatgtatctgtaatatatatgttagatacagatatatgttatatatatctgtgatatatatatataggcacacccatatatataaagctcttatgcacattagcatatggcttttgggtgaacatacagtttgatttatcttaggtaaagacctaggagtggaattgctgggtcatatgatacatgcatgtttaacttcataagaaactgccatactattttgcattatcaccagcagtgagtgagagttcttgttgtgccacattcctgacagcatttggtagtatcagatgtttttgtttgttttttaaaaattgtagccattctaatacatgtgtagtagtatgttgtggttttaatttacatttgcctaatgaataatggtgttgaacatatgtttgtgattatttgccaccagtatatattctttgataaagtctctgtttgggtccacttttaatcgggtcatttgtttccttatcatttcattttgaaagtagttattgttaagtctgaaaccgagaaggatctgagaccttatcctattgtgagctaacaatgtagtctgccacatatatacacacacacacacacacacacacacacacacatcatatatatgtctcatatatagatgtctcatatatagatgcctcatgtctcatatatagatgtcatgtatgtatatgtcatatatatatataaagctcttatgcacattagcatactggcttttgggtgaacatacacagacatatagatgtcatctatatatatatgtcatatatagatgtcatatatatatgtcatttatatatatgtcatatatatagatatagatgtcatctatatatatgacatatatatagatgacatctatatgacatctgtatatgagaaatgaggctttctggagcagaaaagcaaacaacttattgctcttggcaaaaacagccagagcagcatcttagtgctgctccttgagcccccttggggtggtgtagtgagaatcacaggtctttctccacatacaatctgtgttagagggtacagtgtaggagaagacgatggatacactatctctagcttccaaggcattttctattcaaatagagcccctgctcaagaaacctgtactgtgcagaaatatgaaaatcttcaatgagaattttctcccagtaagcatatattctggatatggttcttttttgttgttgttagatatgtgatttgcaagtatttttcccaatttgtggtttgtcttatttatttatttagatagcatctttttttgtttttgtttttgaggcggagtcctgttctgtcatccaggctggagcgcagtggtgcgatctcggctcactgcaagctccacctcctgggttcacaccattctcctgcctcagcctcccgagtagctgggactgcaggtgcccgccaccatgcctggctaatttttttggtatttttagtagagatggggtttcaccgtgttagccaggatggtctcgatctcctgacctcgtgatctgcccgcattgacctcccaaagtgctgggattacaggcgtgagccaccacacctggcctaggtagcatcttgacagagcaaagattttaattttataaattatgatttcttttttctttcatggattatggttttgctgttctgtataaaaaaaactttgcctaacttactgtaggtcatgaagattttctcttttttctcaagttttataattgtacattttacacttacaactatcaaaaattttgagttaatatttttataaaacataaaatttggttaggattcacttttttgataactgattgttccaccaaaatttcttgaattgcctgtgtaggaaaaatcacttgaacatatatatgtgggtttctttctggagcctattcaattgcattgatccatttatcaacactttttccaattccacattgtcttaatatggtagcttttactatggtagcttttactaggtagtcttgaaaccaggtattgtgagtccacaaactttgctgtttgttttcaaagttgttttggctattctcattcccttgactttctgtcaaaattttagaataaacttgttggtatttacaataaactctactggtaccttgaggtattgtgtagactctattgatcaatttttaggaacattgatatcttattaatattgtctctaagctgggcactgtggctcacatctctaatatcaacactttgggagactgaagagggaggattgcttgagcccaggagtttgagatcagcatggcaagacttcctctctacaaaaatgtaaaacaaaaacaaaaacaaaaaaacaacttagctggtcccagtgccacatgcctatactcctagatgcttggaagtttgatgggggagggttgcttgagcccaggagttcaagtatgcagtgagctgtgattccatcatggtactccagttaggtgacagaacaataccctgtctctaatatatatatatatataatttaaaaaaacaagtaaaatattgtctcctgttctatgaagatggaatacctctttatttaattaggtcttctttaatttctgtcctcaatattttgtcacttccagaatttttgcacattttttatttgatacactagaattcaattttaatggaatagtaaatgttgcttatcttttatttccaatatttcattgaaaacatattgaaatatgacttttttggattctatggctttgctatattaccatattacttccaggagcttttttgtggatgcctttgaacttcctatgtagacaatggtgtcttctattaataggaacaatgttctttctatcttccaagtctttgtatatctccctcttcctttttttcagccttttattgcactggctgggatgtttattataatgttgaatacgatgatgtataatggactttcttcctttgttcttgaacttaggagaaatcattcagtctttcaactttaaatataacagtagtctaagcatttgttttcttttggtgtgagttgcatgatcaggttaaggaagttcccatctattttagtgttctgagatttaatctgtcaaatctgtcagttttttgtatatattttgatatggtcctgatttaacttagtctcttactatggtgattgattgattttaaaatattaagtcatctttgtgttaccaggataaactatacttggtaatatatttggtattaccatttatatatagtgctgtttttggttttctaatattttttgtgcatttttgtgtctgtgttcaacaggaatattggcctgtcattttcttttactaaaatgcctttgtccttttttattaggaagattttttttggcctcataaaattgagaagtgtcttagaagagaatatgtggaattgttatcatttgttctttaaattgttagaattctccagtgaaatgatcgaggtctggagttttatttgttggaaagtttttaacacacattagttctttagtagatatagaactcttcaggttatctgttcttgagtaagttttgctaatttgcctcactcaaggaattggcacatttcctctatagacacagacagatttgtattattctcttattatttttcttttaatgtccataaggtctcagtggtgttccttttgtattcttgatactgatatttgtgataactctctttgttttggtcaatctgtctagagtttcatcaactttattatttttcagttaaagcagcttttgatttaattgattttctcttttgcttttcagttttctatttcagtaatatcaacttattattgacaccattgatatgtttattatgtatttccttctgctttctttaggcctaaattgctcctcattttctagtttcttatgacagtagcttaggttatttattttagggctttcttattttctaatatgactcaatgctgtaaattttctgcaaatattaatttagctgtcccacatatcctgatagattttatttttatttatatttagatcaaaatactttatagttcattttggttgtcttacttaacccattaattatttagggatatgttagcttctaaatcattgtggaatcaccaatgatttttatgtaattgatttacagttcaactctgttatgctaagagatcatactttgtatgactttaattattttaaatttgctaagggttgtttaataagcaaggaaagggtctatcttggagaatatttcatggttacttgaaaatgtctattactgttggattattttctaaatgcatttacatcagtttggtcgatactgtggttcaagtctcccatattgttgctgattttctgtatgttgtatggattaatgagagagaagttttgaaatcttaaagaataatttgggacttttccatatctccttccagttctatcagtttttgtcttattttacagttctgtatatatgtgtgcgtatatatatatatatacgcacacatatatatgcacatataaatgtaatgtgtgtgtatatatgtgtgtatacatatatatatgtgtattcatatatatatatgtgtattcatatatatatatgtgtattcatatatatatatatatatatatatatatatatatgaatgtaatgtcttcttgggtaattgagccttttattcatcaagtaatggtcctcaatatccctaggaattttcctgttttatagtgaaatttgtctgatattgatatagccatcccatcattctttggtgtttatatagtttaactttctcctttattttacttttagcctgtccatgttattatatttaaagtgcatttcttgaagtcattgcatagtagggcctttttttaatgaaatctgacaatccattttgttatttgttgttgttagatcatttatatacagtaattattgacatggttttatttaggtttagcttttttattagttagattttttttccctccatttttgttccagtgttcccactttcctgctttttgggggcattatttgaatatttttatcatgatattttaattattggccttttgggatatatattttatattatacccacacaaataaatatacacacacagtatgtgtaggtgtttatatgatgttactctacataaatatacatttctaacttttcacagtctacttaaaagttaatacctttttttactgcaaacaaaatcgggatgccttccaactgtatagatttttaattttcccctttatcttactattgtaataaatattctatctatatacattgaaaactccaccatatattttaattttaactttcacactaatgcacattaaaatcagagaaaaagtctactatattattcgatatttaccattctgttgttctgccttcattttggaagtttgaggcttctcactaatattatttttctttcatctgaagtacttccgtcagcatttctttcagaacatatttattcttgaggaattatttcagactatcttcatctgagaatatctttattttatcttccttcttaaagaatatttttattgggcttagtattctgggctggtcttttcttcagcactttaagtatattgttttatgatcttcctgcctccatagtttctgatgaaaaattcagagtcatgattttttcattcctttatatgtaatgtgccatatttttgtggctcttttcagacatttggttatgaggtttctattctttgtatagaatctattctttgtatagaattggtagattcaaagtaattttgggttgagttctgaacatattgtgacattatggatctttcaaaaatcctctgaatgatattgcttgttttaaaagcaagcagtcaacttaggtttggactgtgagtgttgtctcaccttctgtgggtgattgatccaatgtcagttatgttttaaaacctttgttactctatatttgactgtcctaaaaatacatcactcttctgttattctggaacttaggtggtattttatatcatatttttactttcaaagcctttgacatgcttctttgggtctattacatgcgtgttctacttagcagtggctcagaaattttgttggtttatacacagaattaagcaattcttgtctctagctctctctgctccaagattcacctcaaagtctgcagctctcaagggcctcctccagttctgaggccagagagatgggttttttcctttggcttttacgtgcctgggctgccactaccattatcatcacaggagtgcattctgccaccgggaaagacaaggtgagaaaaaagaagagggaaaagaaacaaacaaacaaataaataagtagggattcccccatactctatggttcatgggggccctctttcccagcgatctactagaaagatttttctcgtgcctttttttttttttaatttttatacctgctgtatgtgttttaattagtccaccctcatgtcaaagttgggtgttaaggaaataatttaaaaagtgcactttccctcatactgtttgttcttcaatttttttgacttttgtctctcatttgcctgccaatatttacttttcagaagtaattttctttttgtatttctgttcagagattttagccataatcagtgaaagaggttggcaatagcaggcttatagcattttggccacagcagaagcccaggttaggatattaaacttataaattaaagaatgtgttagctatacagccatgagatgctggccgcttaataggagaatactgggccagctcctgtcatctctatttcaacagattgttcttaaaaaggagaaaatatctacacatatcagaggaaaagagagtgggatacaaaataatatatatttggccaagctgtcatttaggaagcagggagacaatatttgtaaaatttgtaaaaaaatcaagaactttgttgccactatccgtcttcagtaaaactgttcttagacaagataaagcaatatgaggaactctgaaatgttataggaatgtgctgtgtgaaaaaggtagtcagcatttaaaacatcaataaagaaatacagaatgaacaattgtggatattatggttatgaaataaaataaagcataaatcttaacattgtttattgaagatagtatgtgttatacgattgcaatttaaaaaatatgtgtatcaatctctccattaatatacctgtctgtatttaaatttgcatgtgcatatacacatgtaaatttatacacatgtaaattcacacatactacacacacagatgttagaattgaagctttatagtgttgattatgaaaaggaattattgcttttataatcacataaaacactttaatatcaaacacttaactttatttgagctggtggttttacatgtttcttttgaggacacatttatatttaaatctgatgcttaacctgtaaacatgaagggtttcatatggaaaaataaacaggttatggttgtagataatagaggaatatttaggaatatacaatattttctgaggttatagataatatttcactagaaaaacgtgaattcaatggaaatagaatctttgttattaaaaagtattggagctattctatggctatggaatacagattatgatgggctcatcaattttcattatagaattggcagattcaagtgcagcaaagtttgaacataatcaaaggtgcactgagttcatctgactgcctcattacctgtttgcatcctgtacaagtagaaagcccgatattgtaagctctcaattaactgaatagggtttgttcgctagcatcaggtattataaatttctctctaacttgagtttgagtagtatcagaggtagtgtggagtaagtgatgtcctccctgtatcttcccattcttctaggataggggaccctgtctggcattgcagcattaatatatgtacatggaataagttgttgaaagataaaagtagatactttgctactttgtgtagaggaggttcttgttatttgtattgtgtttgacatttatttgtttgtttgcttgttgatgccctacgtcatcctctgaatgatttgaggcatctgtaatgaatacatacactatctgtccatttttcttctctctgtttcacataatcttacaatttgagatattatcaataaattacatgtcaatatgaaaatagacataaatgataacaatcaagaacactgagataacagggataaaggaatgtcaaaaacattgacaattaggaagaaatagaaacatccagaatttccacgaatactgcagatatgacgcagtaaaatccaagacacactgctcggtatgcaaagccttatgtcatatttaatggcttttcagttgagtgatggtgactgattccatgcatccatgacctgagggatatttattacaacaaagatctgttcttctggggtctagttatttgggcatctgatttagtgagcacatctatttccaatactttccactaaccttgtattgacagttttagacctgctgagtccaaggctgacatagaccaacactgcagcctagttagcaaggcttatctaaggcaactgagtgttgaacagaggggcctgacctttggtgacaattgaaatgtaaggtcagtcagagactcagtactgaacattaagccaaatgaaccagctgtggaaagggttaggctcaagctgtgaaaccaggagttcctccaccagtgttgctgagccaagggcatagatgctagaagttagacccaggagggttcaccacaaggccacagttcatatcaactaattgtatactcttaaatacaaatcaggcttataaacccaggatccctttcagaatctcaatcacctaaggttaggctagttgttaagctcatttgctctagatttttattttgaaaatgcataattagactttttttttttttttgagatggagtctcattctgtcacctaggctggagtaaagttgcacaatcttggctcactgcaacctccgcctcctgggttcaagtgattctcctgcctcagcctcccaagtagctgggactgcaggcgcgcaccaccatgcccagctaatttttgtattttgggtagagacaggttttctccatgttggccaggctggtctcgaactcctgacctcaaatgatccgcctgcctcggcctccaaaagtactgggatttacaggtgcgagccactgcacctggcttaattagacattttttatccagggatctacaaaaatatttctgagaagatgcactctgctataaggtatcttgcaaaaagagaaatgaaaacaatctttgcccaaaatgttacacagttagatttaatatagtcccatttggtgtagcaatttatttccttctccacttaaagaacccctgtaagctaggcattgtctaaggcatgagaggagctagacatgggcacattattcaaagccatacaaaacattaatacaggtggataatctattatttgaaatattttgggaccagaagtgtttcagattttggattctttttctcagattttggaatgcttgcattacacttactggttaaccatcccaaatctgaaaatccctaatccaaaatactccaatgaacatttccttttaatctcatgtcggcattcaaaatgttttaaattttggaaacttggattttggatttttagattaggatgattcaacttgtaccagactgaatagaaaatgtagcaacatgctaaggaagtcataaataggataaataagatttagttgtgaccataaatggaagatgttgctgataaggaccatgaaatctggaagatccaacttttgcgtaaatagcacatgtcacttagaaagcatgtattatatgccaatttctgggtactctccacagactattttacttattttaaaaaaaattttacaggtggaaaaacagaaaaaaattaattttcccaatatataacaaaacttcagtgatgtagcagaactaggattcagatgcacagcttgaggaagttgcatcaggcttcttagatacttgtagaaaataaactgtatgatcattacactattgttgcacggggctagtcatttagtaggagcttaatacatttctctttttctgtaaagccatctttctgtctttgttgaatgaatgagtgtaacaatcactgtggaaaatagaggagggagtcaaaaaaagaaaaatgtatgtttaaaaaacagagtaaacagttgagtttacatagcttcctttttttctcccctaaactgtggaaatatccaggtaaggttggtaagtaagagaagctgaaaaacgaaaacatcaagggtacttattaaatgagggtgatggccagcttatccattgccacggctgacgcagccgtctgtgaggtctactttggcaatttgctctttagagatcttttctgtgcatgggcttcctgcctgaggttggatctgttcaacatggccttgccacttaaatgtgacaccaagccatctgatatgcccagatgaagaacgacaaagtaatcagataagtttataatctcaatgcacagttagaaaacatctggctattacagatgatttagactcatctatgatattaatattggtcttcatcccatgatatttccaggacacagacaggggtattttgcaagctgttactgatctatttgctaatatgtaaacaaattttcctgtgctcttctggatgattgtagcacagagaattgatttatagtgttttgtcaagacctccaatgtcctagattgaacaagtgagtgctgacttagtgtgactgtactggaagtctgtgaggagctggagataaatggaaatgtcaccaggatgcatggatgcctgtctctctgctacccttcacttcctctttccttagccatgaagctttgctaattaaattgaccttccttttttgataatctgaatataaatattgacaccatgctcagtattgtgagacaaacaaggaggatttaggctactaatgtcaatttcataaataattgattgcaaaaataatgaagatagtagtagttgtagtagtagaagtaattacagtagtagtattagcagcaagaataatcctagcgttcataatagctagcctgattgttgggtaggagatgagcactttgatgttccttacagaaggtttgcttagcaatgagtgaaagctcaggcagaagagtaccatgtggccacagcctggatatggtatatttatatttacccagagtggcctctgatccaatctccttatccccagttaattcctgctatatgagcaacataaattcactcttttaataacaaaccttgggagggctaactctctgggccattacccttcactagaatggaagctacctgtggacaggggctgggttttattcaccagggtatacctaggggacacccagtacagagcctggcacacagatgggattgatgcacatttcttgaataaaagaaccaattatactagtcgctaatgtcagaagaattatgatgtggtcaacttatttcctgatgttacctccacaacagccaagtttccaaggaatgagtagaacatgggagattccaggcacagggctcttggtcttagggagcaaggttgagctacaggaacatggtgagtgattgaagaaggccacaggaaagccaaacgggacaatcatctggacaaattaagttccagattttgcaacaatcatgaccatttatttagtcaacactttagtaggtacagaaaatactgctaagcgctctatcctattttatctttccagtgaatagatgaaagcagattattattccaattttatagttaaagattccaaggtttatagaggcttattgtgttgctctaggaaacaaagctaaagaataagattgtgtgtgtgtgtgtgtgtgtgtgtgtgtgtgtgtgtgtgtgtatatatatattttcagatcaaattgattccaatgctctgaacttaaagcaccaggttacactgagtcattagctagatatttatgtttatactgtccattgtttctgactttctcttcaattaataataatattaagtgaccatttagtgattttcaaacactgtaacatgtaatttcctgaatcttcgcatttaatcctcataacaagccttcaaattcagtactagtatccccatgcagcaggtgcagaactaaagaacacagtttcacagtttgaccaagatcgtgcagcttgtaagcaatcaacttggcacttgtgacctggctgtctgatactagaataagtgctcttcttaatcactgtgattcattgattcctgaatttaactaatttttggtgacaatatgctaggtaatggaaaagcagtggtgaaacaacaacagtcaaattcccttctccaaagacaatacacaaaacaggtcaagcatgtctgtttgatggtcataagtgctacagagacaaaattgggaaagggtaaagggaggctacaattggaataccagggccaggaataacctcgttttgccaggataagaaggttacaattgagggagccatacagatatctatggtgagtatatattgggccaagggaaaatcaaataaaaaatcctttggatgagactgggcctgatgaaggaaagaaatgggtgatcatatggagtgaacatgggtgggtggtaggagatgatgttagagagataacaggagaccagattgtataaaatgttgccagccacttcaggatttgagcttttatgttgagtgagatcagaagccattggagaatcttatgagaggaataagactatctcattattaaagtggatagtgtgttgtcgacagagcagggagaggtaacaacggaaacacagagacgagagacgaggctattccatgaaatgatggcttggaccaaagtggtaaaggtgtcagggaggaaagtagtcagatattaatatagtttttttttaataagtgagattttgttatgaattgaatatggagtaaggaagaaagagaggagtcaaagagcaactagaaggtgaggagactccagggagaacagtgtggggagatgagtaggtttatgtcagatgtctttatatctattagatgtctactagacatcccagtggaggtatcaaaagggtaatggcctacaggcatttgaaattcaagggagatgtgtggatcagagaggtaaatattgaagtcatcagaatatagttgttattgaaagccattaaatcaggatcaccaggcaagtaagtttagatagagaaaagaaaaaaaaagtgctgctttcaaagttactttgctaacaaagatgttaccaaagaggattataggaattctctgttgtgcttttgcaacttttctgttgcaaaacttttctgttgcctgtaagaaaagagagcattctgtgagtctaaagttagttgaaaatcaaaaattttgaaaacatgttcccacatgtggacatactcccttgggttggatctggcctctttagaaggaaataagatacttgcttattttggtctgaaccccagactttattcagaaagcttatacttgaattatcttcttgaacatcttatcacttcgtcagcttacactgagtttgtggtcaactgagttccaaggcatattctaataatctcttcttaaaccaggtctccctcattgtatctttcaaaaatgaatttactttttgacaaccctgatgatagatcatacattatacataataaatattcttaattgagtttgatacaaacacgaccgagtgctttgggctctgctttcagtgtcatagcatttaccagttaattagcatgccctctatgctgttatctgaggcttccaacattctgtcatcttttagatcactggagaaggtccagggaagcataggtactcacccagagtcagcattttcattgaccaagatctatccatgaactcttttttgctttcatccagctgtgaatttacctaccacaattatccagcagcccacatttattcatgatattattaaatatataatgagggtctctattaaattctttgatgaaataaaaacaccatctgactataacatttcttagtctaccagcccagtaggcctatcaaattatgaagcttgtcttgtcttgactaatttgcaatgaatttacactttacactgccttctagtgatcaatgtattttgttattatagcaccacaaatcatctatttaatagtccttttctactaatccaataatatgaggttgctcatgtgaattatgcaaatataagaatgtcttaggctgggcatggtggctcatggctgtaatcctactgctttgggaggccaaggcaggaggatcacttgagaccaggagtttgagactatcctgggcaatataacaagacccctgtcactgtaaaaaaaataaaaaacagctgggcatggtggcacatgcctggggtcccagctactcaggaggctggtgcaggagaattgcttgagcccaaagttcgaggctgcaataagctgtgatcacatcactacactccagcttgggcaacagagtgagaccctgtcttaaaaaagaaaacaaaagaaaacaaaacaccttgcctaccctttctgttttcgcttattattatttttttatgagaagaaacctggtagacctaacataggggtcttccagagaggtgcatactgtgaagttgtggggttattctttttttaggaagatgagggaacaggcctcataggaatcaaacagaaaatgttactgcctttgtttccgattttatgggcaatagctgtttttgatggtgtagttaaactccacaggaggcagtttaaatggcagaattaaatgtagtttggtgaaaatgtttatcaagtattttcttaaacagtttataatttgcacatttcttttctaaatggcgcttcttcattagtgcagactagagcttgctacagactgctaatgaattatgacacatctattattcatggatcttacaaatttaggtgacattctgaaggtcaccctatggtttataatcccaaatgatcttgttgaagaagctccataatgtcaccaactgtaaccatagtcacctgatttttgccaggtcgtgaccatgctttgtttgcaatggatatgtatttcagtgatatcacagcctcctgagagaaggcacagtgctcagacaagctgtaatggctattctgtgtggtttcatgtggccatgcctagtataggttgtgccccatggttgatgaaataagatgcctagctcatcttctcccccacactgctcctggtcttcctgcatgctggcctcagtgtattgttttctgaaacaaatcatttcttgatttgcttatatttaccaagattttgacagaattgaagacagttggaggaacttgggataatagtaatgtagggattgtaaggcattcgggaaaataaatagcaacagcaaatacttttatgctccaggcagtgggctaaatgcttttcatgtgttatctcatttaatccccacaacaaccctatggagatgggaactgttttacaggtgagaaaactaagggcagaaatgtcaaattgtccaacatcactgagttgttcagtgataaaactgtgatgccagccgttgtcctatggtcccagagcccccgctcctgatcactatgcagtgccaccacgtagcttttcgctgatggagaccatgccaaacatgaattctaactgtgtgttcagagatggtgttcagcaattttaatgtgattagatgcaaccgtgtgatactgctgatatctgactatttttacataaaaagatgtggtgatttgggttatgaaaaactgagagactgaggaaatgacaacaattgcaagcaactgagaagacctgctgaatcgatgcaacatgatacattggattggaccctggaacagataaaagacatcagtgaaaatactggtgacatctgaataaggtctatagtttagctcatagtggtgaaccaatgtaaatttcctggttttgataattgcactaggtaagatgttaattttaggggaagcaaggtgaagggtatgtgaaaatactctgcagtatatttgcaacttttctgtaaatctagaattattgcaaaatacagttctatttagaaagtcaaatcaacagataatttcatgtggtttaaccttaattatatatttacaaagatcttaaatatttgtaacaatcacttcttatttaattatagaaacatgtatgctttctttaattatcatcctgtaaccaccagccttctccctactccccagctctaggcaaccactaatctactttgtctgtctatcagtctccctgctctggacgttttacatgaatggaattctgtaatatgtggtcttttgtgactgacatctttgatttagcgtaatgttttcaaggatcattcgtctatcatcactttgttcctttttatggacaaacaatattccattgcatagatataccccattttgttcattcatctcttaggtgatgcatatttgagttgttcacaccttttggctattatgaataatgctactgtaacattagtgtgccaatttctttgtgggaaaatattttcatttcttttagatatatacttagttttaattcaattacttctaactcgaccccggaggaaagtctcttggagagaaggaataaaagaacctgaacgtgctaaaaaattcaaattattttcagagattactacctctgtgagtctcagtttattagcatcctttatagataagctgtgcctgtaagaaaagaggggtagtaaacaaacacgtatacacacacatgcttgcacaagcatgtcgtcaaaagtgtctccttcaaagaagacttctggagaaaaaaagcataaaccttctcaagctattgccattgttcgggaaattgggtaattcatctttaggaatttcttctgactgatatttggtcatactagaaaaactgaccatttctaacagcttttgcccctgcttaaacaagattgcttctggccatctctaaaaattaaatttcccctggaaactgttctttcatgatgtgtttttggaatattggctgtggttaggagggtaagctcctcaagggccaagcctgtttcctcctttctggcagagcaccttcatacaacgcaagtactcaacgtgtttgctaaactgacatcaattgaaatcattgaatcatagcacttttttggaggacgtgtctgtcttctcaatcgctcagttttcttttggaaaaaggcaggttatagagcaattcattaatcatttgctgtcccaatgttccttcctgcttttaatagcaaaaatgagtcaagacctgatcttctgaacacatcacttgctgcctacatgaggcagtggagacttagagtacccctgtggcctgctcctcctacatctcttcttttgatccctagtccttgctgaccttctgtagaggcttattcacccagcttgtgggttgaggtgatgctttcttcctatttactgagagcttccccacctctccctagatactgcataaatgcaaggaaatttccaagaggccccttcaagtataaccacagcttttcaatcatttgacattttggtcatagagcagaaccaaattatgtagtcaactatagacaccatgcctgattgaaacttgtatcaaaaatcccaagaactccaataactcttagttttactttgtactgtttttaaggaggctgatttacagcagccttttttctgaattttatttgaggaaaaatatgccctcctgccatcattccagctcctgtgacactgaggcctttggttcccttacttatatcagggtatctggggcttggttgttaatttggtgtaatgtgattaattgagacaggcatacactcaggcctaaaagataatcaaatccagaaggggaaactgaggtcctgaaagggaaaaatgggcatttacactagagtcaaaagtggatatcaggggtttggtcctgttatagaaaagttctttttctgacatttcttgatgttctatctagcctagtggactagcactaagtactgggtgactgctcagtaaatgcctctggtgggcagatggcacagaagtgcttaggggatgttctgcctcatacagagcatccaactctcctacatggatggagactcacatgatcctggtccctgcagagaaaatctgtgcatttaccacaactttgactcctaagaagctctgactttttgactaaagtcaatgggggtattttgtcagcaggcacctttaaccaggctacacttacaaattcttgtaaatcaaattttgtacaagtagatacttttataacccatcatattttaacctcaacaaagtggattctttacatccagaaatgaaacaataatgactacattattccaaaaaaaatttttttagtagttagatccaggtggatttgatggcctgattttgtcccttatactttgatatatagtatccctttatttatttaccacaagaaaaaaacccttaaaaggagggaaggagggcatctttaatagccaagcttaaaattaaaggcgactgaaatattaattcttaaacagcgctctggtttcctgagtagccaagaaagcactatttagctctttttttagactttacaggaataggaagtgctatgtatcaacatttaatttagaaactatgaatgctttcagatatgccatcttaaatgtttttacttagggtgagggttatttcagtgacatttactttgtttttgggcataattagaggatgaggatctcatataagtgcattttaaaataacgaaagcttgctcatttaagagcctatattttttatttcaaatgtttctgaagtaaatcttttaaaaatgtaattgtccaatcatttccttttgtaaacaaaagtgtttaatagacatataactcttcctaatggtccatggcaggacgcccaagtgaatctttgtgtctgggaaacttagatttgaagagaaccccagttcacccagtccatctccctcatcttcctgcccgatttatagaagaaagatttgaggagctacttccagccaaatgccctgagatttcttcggtactcttctccttccagacatccatgacctggagctttgctttcattatagaagtgctcagttgctcaggctttgccctcaacaagctgcaacccactctctttctagggttcacctcaaggagctgctgactggcccccaatgcagccccacaatgtacccctacagctcttgcacacccacttttctgtctgggattcctttccatctggtccaccttagatggccgatagccaccttgctttatctgtcataggtcatatttaaggataatttcctctggggaactttccaactcccccaggcggaaatagttcctccctacattacatccttgattttctctatgagttctcctctctcagctcttggccacatttgtaccataccttgagtgtccatctgtctttgctcactcactcattgagcttaaggattcaatccaactcatctttcctgttcccaatctgataactagcagctctctatggggataaattaattgtgggacaaagaagatactctaaatccacatcactcactcacttccaatccctctcagatgagcttcttttaatttaattcttatcaagttcttttaatttaatttttgtcaaatacttgatatcttgaatgatgaggagagaattggagagtctctgtgtgtgtgtctctgtgtgtaggaagacaagtcacatattctcaccctgagacatagtttttttctgccagccaaggagaaggagcttcctgcccatcagagaccccaccctttttacctggcagggtgtgctgtgaggcattgcccagagtgtcttgtgcaacttggggaaacgttgaaatcacaacctacagctaacaggaactactgaaccttacagagttttgtagcccatgcctaatattaatatactctgtctcctagatcacctcaaagtagtgaattttagctcttttgtctgcatgtctgcaccatgcgtatttgttgccatttgttttcattgccattgtgaagccacactgcctgtgcttacatttcgccttcattacttgatcattcaacctctcagttcttctgtttcctcactgataaaaatggtggtgtaaagactaaatggattattgtacagaaaatgttgggaagagggccggtagcaccaacacagcctgaagcatgctcgctattattactgttaagatgactgtccaacttggaaccctcacttcctgactcactgttattgtcttgggatttgctttgtctaccctctggtagctggtagaatcagactggctcaattgactgtaataagtaaggccagagtgattaggcttttagtaaggactctaaaaaaaaaaaaaaaactaaaaaatctatatgtgctctggagcacatataattttaggctgtgggttagcatccaggggccctcttttttcctttctgattcatgcctctgttaagaatagtcgaagttgccagaaaagtgatttttgtataagtaagagaggtgagatcatgttaaattaggaatcagagtcaagaaaagatgagaagctttatttagaatgagatttgggctgaaaatgactgtagatgtttttcttttttaatagtgtgagaaatacagccacaggtttgaaatggaactatttaaacgtttattttagcctagttgaaaaaagaagagagccagtctcttcctagacctgaacaatttatctttaggatgtataaagaaagtgagagactgcatgaccttgttttctctgaaattttcgctaccttgctttctgtctcttttttgctttttttgaggggggataatgtgtattgttaatgctgaaaatagtaaatgatttttttttctttgcaatagatgtggaaagttaataaaaaacaggcatcatagcctatgcaagtgtgttacagagtacagctaggtgagtgactcctgatgagccttttctccatagttctggaatcccatagactgatcatatctagatccagagttgcctatagttggtccttcaaacaggctggcctgtccgcagaacatttacagacacagtctggcctctaggcaaagttctcaactgagtgtcctgcttaaaggcaagttgtgaatttctttttaatttttattttattgtaaattgacaacttataatttcatgtatttatgaggtacaaagtgatgtttgatttatgaatgcaatgtgcaatacttaaataaatgtaacaaatatatcaatacatcaaacacttattttttgtggtgagaacatttaaaattatgaaaagatgaaatattgaattatgaaattatgaaatatacaatactgtattcttaaccatatttaccatgctgtgcaatagacctcaaaaccactgtaacaacgacaacaatgtctcctatctgaggttgagtttggttcttgaaatttgtctctctctttctttctctattgacttatctagctccctgaatatttttactgatttcacaaaaaaagttataaaatgatggaaggttttatctgccttgctcatttaatcttcacaatagccatgttagatacacatcattacccttattctaaagataaataaatggaggcatgaaaaatataaataagttacccaactttatagccagaaagtgttaaagtgagaactatagcagggtctttctgaccctggggatcttgtgttcttggctactcactacctagaaaccctaaataaattaagttctaaacttatgagatttttgccaaatgatacatagctgccaaaaaagaaccacttgaatttggacaaatatattcctgtaaatatacagggaggcttctttatcttttgacttgttatcagcttgactctcttattgataaagtggcaccatgttgagaaagagtgaaaataaagttttatgtgttacagtatttctaaaatttggaatgacgtttctgaaaacacgagcacctcttgtcctcctttctgccatccttgaatagaaatgatatggctggaaattcagggtaatggagaaagaaccctgtgctatttgtcacgacctctacttctgtgattcctccccctaaatacaaagataatgttttaagggaatatgacacagttacttcctaaaataaatgaagaattttaatgtaaatgaacgtattattttaaagaaagatggattatgatggtctgttggataaattcaggaaaagaactctttgcctaaaattacccagcctgttcaagatgcagtgatatatatggaacagctcctccacagaaagtccgagccgtttcttctcccagaaagtgacccagtaaaaatgctaaatatacacccaggtcctctctaactgtataggcaataatggaaagagatgactcagccttgtaacgacaggagacccgtggaaatggtttcttttactggagttggtctaaatttctgttttgttaaaagttttaggctatttaaaatcaatagtaatatttaacctatattttacaaaaaagaaatacatttgtttctttaaagaagttcagagatagctgactaatgagcttattaacccagggtttataatagaatgctgaaattatacacaggataagatgcatgatacctccttggctttggttttcttattttttcagggaatcacataagtcaagttagatattaaatttgcctgtatacatttatttttaaagaagatgtttcaggatatttcaattgtactgtctacaaagaatacctctggcatccaaaatggaattacctcttttgagggaccaaattgcacagaaaaccaggataagattctatctagtcatacaaatgcaagaaggtttgcttggcatttctgtggactaatattgaattccatggagtcagttgccaagagctggagattcagggtcatggatatgcttcccacagctccttctctgcatacggggagtctcattactgcctgtctgtattcctgcacatgcctccgtacccatgtttctgcctgtttcttcttcttcttccctttttttcatttgctgaaataatggatgccagtttaacttactttgttttgaagcagtacgatcaaaatctgttccagtgtacctacagcatccccactgccatgatgtaatatttgtctccatcattccagttactctacagacagttccaactggtaaattctctggtgctcgatgcctcagtgaaacttacccatctgctctgtgtaactccagtaaaccctagattccaccaccacagtttagtctggctgcaggacattcttcctcttacaccctcttgctcctggtgacatcataatcatcttctaacattggtcctcaatttcacccacctcccagatactttcaaaggagttgtatgagagagggatggggcatagactaagggacacatattggatctgccattgtacctgtaagcaattgacttgatcaatgtcttggtttcctcagttttaaacttggaagaaatagtccctcaaagagagaattcaggaacataccctacatgaactgctttctgcagagtagacagtaatgaggggtcaattcctgttttcttcccaacactcactgctttcctcattaggattgcgtgtcctctggtgctactagagaactgaacattgcatcgtttgaactttagatgacatgttagagttttgggagatattggggctttgtgctgactttttggttttattttattttgttttgtttttgagacaaggccttgctctgttgcccaggctggagtgcagtgatgaaatcatagctcactgcagcctcaaacttctgggctcaaacggtcctcccacctcagcctccagagtagctgggactacaggtacatgcctggctattttttaaattttttttatagagatggtgtctcactgtgttgcacagactagtttcaaacccctgggctccagcaatcctcctgttttggcctcccaaagtgctaggattataggcatgagccatcatggctgtcctgtgcttacttcatgtgactgttttataacaaccccccaactccaagcaggaatatatgttttgcttctttctgttcctagcagtatgaccttgagtaagtcattctcaaggtcatactgtggttcagtctcatcggtaaaatgaggctaacaatagcactgactcttgagttgctgtgaggattatatgaattcacacacgtatttagaatagtgcctcacatggagtaagtgctctatccctttatgtttaatagtaactgattttttaattataaaaccttggtcctctgtggttcttataccaaactttttgcatgggtagggcactgatcttcttcatagcagtcagaaatcccatcattttagccaagttagttttttccccttggcatttggtttgctgctggcatagtatttgcttttcctgcttttgcttatggcacagatgcatgagttagcatgactcggactggtatgttagtgtgtttttgctccgtagtttgtcttcacagatacttggtcaaacttggccattacacagtctgatgatagctctgtttcctttatgttatcattctttcagtaatgagagttgaattctttctctctcctgcctcagatcctcaggtgacattgcacaagggcagctgcagccaatgccttgtccaggcagttatattagtgttatttctagacattgtctgccctgaatacctgttagcttcctgatcttggcatactagtctgaatgagataaaaggaaacataatggtctccagtgtataggattatttgactaaacaggaacttgccatgtgttatgtgtgtcaacaaattctcatttttcatgagttctttcaactctcttattaatttcctgtgatacaagctaatatttctggctctacaacccaacttctttttactacatgatgtccgctgtcattataacacctcttaatctctctttctgtctcttcctcaatccccaaatctgctctgtgttacctgctcagatttctctataagagaatagatcctaagccaaatattactttggcagtgaaaaaaaaaaacacataagaacaccaagtgaaaagctggtgaaatggattcacgtggaactatctttaaatcttggcaccacaatttttaccttgggaaattatgaactttggtctcctatgttattttaagacagaataagtagtatacccagagtacctgttacctttaaacatggctcagtaattgaaaggcatattactagaagtatttggagataattataatacttggaatatcaacagataaaaatactagttgatttttcccctgaacttcagagacactcatttgacctccaaaatagaatgccttgttcttgatactcattttttcgtttaatacattcagtgttcctgctgcaggtgccaaatgccagccttgagtttcgtgcttttaagtagaggtatagaaaacacagagcttatggagcccactctttctcagtttatgttactttcactgtgagcacctgcttactgtttggcaaactagacataactgttcagcatctgacggataaccctgctgaggacggacactggcatcctcctccaacacctccttctgtgttcctagtgtttgccctcaaacagtctccctgcaaaggtgggagcacctgaaactaggattgaagaattcagttcatccaaaattctgttctttcttctgctggtgtcattagtttttgaggcaagtctaaatcaaccaaatatagagtctggaattctaatatagtagatctgaatgttggctgaacagtggaatcgtctggaaaaccttaaaaggtataaatgcctggtcccaccccagagctctggagcatctggatctgtatgacctggaaggcagcaattggcattagtttcttccttgctttgctccccgaggttgcttgcattgacaggggaaaccaatttcatttgacatctgatactcaggactgccccgctattctcacccccttcaatgagatgcatactaattagatgtcaagaaaagatcaaatccttcagaccctcaataccactattgcgatgtcatttcaagtattttatctatctacttcatcacagtgatctgctttagatgataggtaacttgttttatctttgagattatattggtagcttaaatttcttggttacatcaccttgaaaggtgtaggttattgggaaattctgaataggatagcgttatggagaattggctttcgaactgatgaatcctgtatttggaatctaccatctttggcaggtaacttgaactctttgggactcttcatccacatctgtaaagtgggattaatagggctgtagtaattattaacttacattggatcagatatattttgtgaaaatccacacctaacccttgcctggaatatatgaagttctcccaaaatatatactttttaccccaatgagtaaggataaaaatatttaacaagtttggctaacacaggaacagaaaaccaaacactgcatgttctcactcgtaagtgaggcggaactttctgttcctacagggaggggaacgtcacacaacggggcctgtcggggggtggagggcaagaggagggagaacattaggacaaatacctaatgcatgaggggcttaaaacctagatgatgggttgatgtgtgcagcaaaccaccatggcacaggtatacctaagtaacaaacctgcatgttctgcacatgtatcccagaacttaaagtaaaaaaaaaaaaaaaagtttaacaagtttggatgccaaatatatgttttctaaggaaaaaaataccacagtataatctgttgctttctttcagccttgtgtcattcatcacagactatttacttgacacagcaaaacatcatatcatctaataatggcccgattgtcagcttctcaatagaccaatcatcatccccatttgacaagcacattttactcagaaatgacatcaaaatgcaatatttttcttgtcaagctgaactatgccatgcctactgactcctgtatattctcaatattcattacccttttacttggtctcacccttttgctgtcaaatcgcctcattttatttatttaataatctgacaaagatgaaagaaatattaccatgggcttatgagacaattgaaatgtcctttactgtcatcattttcatttagatgagagaggcatcccccggtcatgaatttaatttaagcaatgtctgcgtgttgaatgttttgttgtgcagctgtgtcagtgtgtgtgtttatgtgtgtgtgtgtgtttccaaaagtagtttcctgaggtagactttatgtacagccctcagattaagtgatcttcaccaaactctgctctttgttatattgcaaagacattattttaaatcattcagtctataaacctgaaataaaaccttactcaattctaagtggatgtcatttaatcaacataaatcatggctgtatatatttaacattacttaaattctgttaaagttttttgaaaaatgataactagctgggacacctctttttagtaaagataaattctgaagatcttaggcaagtgttcttcaacaaataccatcaatatgctggttaaccccaaatgtatatttttagtcttgacttctattataaggcacagactcctatatcaaattagcattgctttctccaaaatattgaactcatatgaggtatgtctgtgtggctgagatcatactcattatcttccctctccaggtggttccccttccaatgtccccggctcactagaccatgcttatatattctgaatactgcccagatttgtgtaattttctttatcttcaatgttgctaattcaagtcaaggcaccgtcaggtctccctggacttcagtatgctctgtggaagaaagatgtcattctctctgtttagcaattaatctattagatagcaagattattttttcaaaaggcctgtagggagaaagacaaggtgaaagatcttaattgtggtgaccatgaaatttattttacaaacaaggacgcttaagagtgaagggagcaactactgataattattccaggactatcgccatagaaaagattagtcccaggaaactggggtgttggacagccagatcttaatacttttcactagaaagtgaatttcaccattaatgaagacatagacttgaagaattaatgtagaaatgatcgataccttagataataaattaaatatcataaggttgttattaccacttaggaaaataaatttatttttctttaacaaataaattctaaaaatattattccctataatgtataatgagtaaatttaatttttttctacaaacatgtagaacaaacttgcagtaattatagggttatatttcatagaagctgcaacatgagacatacagaacaaaagctgggtggttatgaatcaagccattctagacaatcttttggcccagtagatgtcctagtagatgtttcggtagatcagccacaagttggtgatgacaaggcacagatagtatgcagagatttaattgaaattatcacttcattctgactgctgctctttattctttatagtaattggcatataaatattccttgatgccagaaagaccaaagaattaatttctcctttggccgcttctttgaactggcattttaacctctctacacattcatgtttcttctgttttaaggaagtgatgacatttattctgcctacttcataggactctaggaatatttaatggagtagtacagatgtgagttctctgcaacctgcgtaagttctttgcaaatgattggtgttatcataagtgctagactaccagcagcaaagggaggcctattttgctggttcataagagcccaggttggagacacagttggcagtacagaagggtgccctagtcgtaagctagacaaagccttgctcacagtcttcctctgtcacaatgttataacagtttcagtgaaatttgagatatggcattctcatgactatggtgagaaagttgttttgacttgttgttcaatccttgagcaaaaataagcctttcctaaagtctgcatgctgggtccctaacacttgaaggagatccatgggccatgcggcttcagctccatgcagagggtggctgcaggtgctgcaagggcagcttaagttctggacagtcatctctgttcaatggaatttgtaaggtcaaaaagtagacttaaaaccaaagtgatggggctgggggagtggagaggaatagaccctgcctatgtgaagttagtagtggaatagttctctcctgaaggtaaacctagttttcaaattgctttgtttattggttggcttctctacctgcatgaaaagtttatgcgttttagaacgtggcaaaacaagtggagcatgacttatgtttcataatgtacagagctgatttcctgagttccaggacaatgttcagccctttagtcccttgagaagttggttctctctctctcttatccataccctcctgaaacatacactcctctaaaactcatgttatcaccagaagtgtgataccaaagcttagttaatactttgggcacagatatttggctaacttccttgtaaatatgcacagtaaacctgagtggaagtgtgccaccctttccttcttcccagttggtgccaggacaggtggcatcagcctatcctagccacctgtctccagaaaccccagtctgccccagggtggactccttagcccacactctcagcacagccactgatcttgacaatgcaaaatgcaagcatttcagagacatagtggggcatccccaccctgctaggaccttcctctctcccaccctcttcagtgcttggaggctcggctccataggaaagaaaaagaagagtcactctgtttccttcatcataggaaatttaactacctcattttcaaatcatggagtggttcagtttggaaaagcctcaaagatcacttaaggtactgaaaatttacaaatgggaaaattgaagcccataaatagaaatctcttggctaagatcacgatgttaattaatgactgagttggacttgtgttcaggtctgctgtctagtcattggccttccttctacccgtcgtgattccaatggaagataaaatgtgtgctgggacacattttatcttacctagttccggacaatcatctttattaataatgcaccatcacttaagagtatgtgcataatggcattgcatttattttctttattgatcattatgaatatttcagtgctatttcatttttctaaggactgtcataaatggctaggcatgttttagagatctcaccttaaaaatgtttttaaaaactcaaattgtgtcatgaatatggaagagatacttttcagcagttgctggaaaatgacatgtgcatcccttatattaaaactcttactttctatatgccttcccagtaagtgcctcctgtactccagagaaaaccatttagaggttagattatgataaggaaatgccttttgcatttgttgtggaatgaataaaggatttatatctttaatgctgcattgaacaaatttgcagagaacattaaatattctttaccttgacatttctgatacccatgattttgataacctttgagtcatggattgttgattacaaatgccttatatgcgtctgactcaaaatatgataagaactcaaaccagaagcatttttaaaagcttgtttaaatttctggggttttttttgttcacttcaattatttaaggaatctgaataaacagattagcttttccactttgagtttacaattagggactggaacatttcagccaataataaccatgttgatgataaaagcacactgtgtgtatgctgtcatcttaatttgcttgagatttcggtaccctaaatttttgaaggtggagtctcactctgtcatccaggctggagtgcagtggcgtgatatcggctcactgcaacctcgcctctcgggttcaagcgattctcctgtctcagcctcgcaagtagctgtgattacagatgcctgccaccatgcccagctaatttttctatttttaggagagacggggtttcaccatttcggccaggctggtctcaaactcctgacctcaggtgacccacctgccttggcctcccaaagtgctgggattacaggcataagccactgcgccagggcagtgctctaaatttttaacataatgttctcaatacacagtattcctgtaaaaaccacaatactacattgtcagagggcacagttcacattcaatttccagtgatatatctgatttttattacatgcatggttagtttaaagttagtcttagaactcctttcattctggtttccttatctcctctatagatttccttgttttaattcttatgggtacatagttggtgtatgtatgtatgaggacatgagatattttgatacaggtgtgcaatgcaaaataatcacattagggtaaatgaaatagctatcacctaaagcatttattatttctttgttttatgaacatttcaattatactctttcagttatttatatatattgttgagatggagtctcactctgttgcccaggctggagtgtagtgcagtcatggctcactgcaacctccaccttccagattcaagtaattctcctggctcagcctcccaataggcatgctccaccatgcccggctaatttttgtatttttagtagagacgggatttcatcatgttggtcaggctggtctcgaactcctgacctcaagtgatcctcccacctctgcctcccaaagtgctgggattacaggtgtgagaacccacgcctgtcctagttatttttaaatgtgtaataaattatcattgactgtaatcaccctattctgctatcaaatactagatcttattcattctatcttaactatttttttgtaaccattaaccatccccactttccctgcccattaaccatcactacccttccaagcctctagtaaccatcattctactctctatctccatgcatgcaattgtttaatttttagcttccacagatgagtgagaacatgcaaagtttgtctttctgtgctccactgtgtatatgtatcatattttctttttttttgcttctccattcatattcttttattctatcaattttttagactatatgtatgtatcactttttctttatatatatatatttttattatactttaagttctagggtacatgtatgtgcatgacgtgcaggtttgttgcatatgtatacatgtgccttgttggtgtgctgcacccattaactcgtcatttacattaggtatatttcctaatgctatccctcccctctcccccaaccccacaacaggccccagtgtgtgatgttccccttcctgtgtccaagttcatctgttgatggaaacaggttgcttctaaatcttggctattgtgaatagtgctacaataaacatgggtgtgtggatatctctttgatatactgatttcatttttttgggggggtatatacctagcagtgggattggtggattatatggtagttccatttttagtttcttgaggaacctctatattgttctctatagttgttgtactgatttgccttcctaccacaaagtacaagggttcccttttctccacattctcgccagcatttgttattgcctgtctttggataaaagccattttgactggggtgagatgatatctcattgtagttttgatttgcatttctctggtgatcagtgttgttaagcaccttttcatctgcctgtttgccattcgtgtgtctttttttgagaaatttctattcagattttttgcccattttaaaatcagattactggacttttttcctatggagttgtttgagctccttatgtattctggttattaatcccttgccacatggataatttgcaaatatttccttccattctgtaggttgtcaattcactttgttgattgttttctttgcagtgcagatgctttttaatttgatgtgatcttctttgtctatttttgctttggttgcctgtgcttgtggtgtattactcaagcaatatttactctgacaaatatcctagaaagtatccccaatgttctcttttagtattttcattgtttgaggtcttagatttaagtatttaatccattttgatttgatttctgtatatggcaagagataggggtctaatttcattgttctgcatatggatatccagttttcccagcactatttaaagagactaccctttccccaatgtatgttcttagcttgtttgttgaaaattagttcactgtaggtgtatggatttatttctgggttctctattctgttccattagtctatatgtctgtttttatgtatccatgctgtttgggttacaatagctctgtaatatactttgaggtcaagtaatgtgattcctccagtttttttctttttgcccaggttggctttgggtattctgggtcttttgtggtttccctatcaaatttaggattattttttctatttctgtgaagaatgttattggtattatgataggtgttctatcaaatctgtatattgctttgggtagtttggcattttaacaatactgattcttgcaatccatgaacatggaatatctttattttttgttctctctgtaatttcttgcatcaatgttgtatagttttcattgtagataactttaatttctttggttaagtttattcctaggtatttaattttatttgtagctattgtaaatgagattacttttttatttctttttcagattgttttctgttggcatatagaaatgctattgatgtgtgtatgttgattttatgttttccaactttgctcagtttgtttatcagtagtaatagtttttttggtgcagtcttcagacgtttccaaatgtaagattatatcatctgcaagcaaggataatttgatctcttcctttccaaattggttgccatttatttctgtctcttgtctgagtgctctacctagagtttccagtactatgttgaataacagtggagaaagtgggcattcttatcttgtaccagctcttagaggtaaggctttcagttgttccctgtttagtatgatactagctgtgggtctgtcatatatgacttttattgtgttgagatatgtttcttccatacccagttttataagtatttttattatgaagggatattaaattttaacaaatgcattttcaatatcaatggaaataatcatatggtttttgttcctcattctgttaatatgatgttatcgtgttgattgatttgcatatgttgaaccatctttgcatccctggaataaatcccaagtggtcatgatgaatgattgttttaatatgttattgaatgcagtttgctaatatcttttatatatatatgatatatatgatatatatatgatatatatatatgatatatatatatcatatatatatgatatatatgatatatatatgatatatatatatctttgtctggttttgttatcagagtaatacgggcctaatagaagtttggaagtatttcctcctcctcctctaatttttggaatagtttaagtaggattggtattagttcttcattaaatatttggtaaaattcagcggtgaagccgtctggtcttgggcctttctttgctgcgatactttttattacagctttgatctcattacttgttattcgtctattcaggttttggatttcttcatgtttcaatcttggtaggttgtatgtatctaggaatttatccttttcttgtaggtttttcaatttattgacatatatttgctcatattaatctctaattattctttgaatttcttcaatataaattatgacatatctttttcaatctctgatttatttggatcttctctttttgtagttagtttagctaaagttttgttgattttgtttatttttacaaaaaatcaacttcattttgttgattttttgtattttttatttcaattttatttatttctgctatattctttattatttcttttcttctactaattttagattttgtttgttcttgcttttctatttctttaaaatgcatcattaagttgtttatttgaaatttttctacttttttgatgtaggctcttattgctagaaacttttctcttagcactgcttttgctgtacctcatatttttttaacattgttattttgaaaaacttttattttaggtttggggatatatgtgaaggtttgttacatacataaactcatgacacaggggttgttttacagattatttcatcacccaggaattaagtcccatacccaatagttatattttctgttcgtctccctcctgccaccctgcaccctcaagtagacccccgtgcctgttgtttccttctttgtattcataagttctcttcatttagctcccacttatatgtgagaacatgtggtatttggtattctgcttctgcattagtttactgaggacagtagcctccagctccatccatattctcaccaaagacataatctccttcttttttatggctgcatagtattccatggtgtatatgtaccacgttttctttatattgtctatcatcagtgggcagttaggttgattccatgtctttgctattgtgaatagtgctgcaatgaacattcacatgcatgtgtatttatagtagaatgatgtatatttctctgggtggtatatacccggtaatgggattgctggatggaatggaagttctacttttagctctttgaggaatcgccatactgccttccacaatggttgaattaatgtacacttccatcaagagtgtatttgtgttcccttttctctgcaacctcaccagcatatgttattttttggcttttaaataatggccattctgactggtgtgggatggtatctcattgtgggtttgatttgcatttctctaatgatcactgatattgtgcttttttcatatgcttgttggctgcatgtatgtcttcttttgagaagtgtctgttcatgtcctttgcccactttttgatggggttgtttgtttttctcttgtaaatttaaattctttataggtgctggatattagacctttgtcacatgcatagtttgcaaaaatttactcccattctgtaagttgtcttgtttactctgttgaaagtttcttttcctgtgcagacgctcttaagttaattagatcccacttgtcaatttttgctttcgtagcgatttcttttggtgtctgtcatgaaatttttgctttttcctatgtctaggatggtaatgactaggctgtcttccaaggtttttatagtttggggttttatatttacacctttaatccatcttgaattgattttggtatatcgtataaggaaagggtccagcttcagtcttctgcttatggctggccagttatcccagcatcatttattgaatagagagtcttttccccattgcttgtttttgtcagctgtgttgaagatcaggtggtcataaatgtgttgccttatttctggactctctgttctgttctattggtctgtgtgcctgtttttgcatcagtattatgctattttggttattgtagccctgtagtatagtttgaaggtgggcaacatgatgcctccagctttgttctttttgcttaggattgccttggctattcgggctcttttttggttccatatgaattttaaaattcatataaaatttaaatttaaatttatgttcatctaaattttaaatttaaatttatataaaaatttcagccagacatggtggctcatgcctgtaatcccagtactttgggaggctgaggcaggcagatcacctgaggtcaggagttcaagaccagcccagccaacatggtgaaacctcatctctactaaaaaataccacaaaattagccaggcgtggtggcacatgcctgtagtcccagctactcgggaggctgaggcaggagaatcatttgaacctgggaggtggaggttgcagtgagccgagatcacacaactgcactccaaccagtgtgagtgggactccctctcaaaaaaaaaaaaaaaaattccatatgaaattaaaaattttaatatctttcctggattatagggtttccactgagaattctgctgccacatattctaaagcttcattgtatgttatttctttctttctcctgctgcttttaggatccttttttatccttgatctttggtagtttgattgttaaatgtcttgaggtaggcttctttaggctaaatctgcttggcatgctgtaactttctttaattgactattgatatctttctctagattttgaaagctctctgttattatccctttaaataaactttctaccccatttctctctctacttcctttttaaggcaaataactcttggatatgcccctttgagactattttctagatttggtagatgtgcttcattctttttgcttttgttttctctgaccttgtattttgtaatagcctgtcttcaggctcactaattctgtcatctgcttgccctattctgcttttgagagagtctgatgcattcttgaatatgtcagttgaatttttcagccttagaatttcttcttgatttttaaaaatgatttcaatcttttcgttaaatttatctgataggattctgaatttcttctttgtattttcttgaattttgtcaagcttccttaaaacagcaattttgaattctctgtctgaaatgtcacatatctctgtcactctgggattggccactggtgccttatttggtttgttttgtgaggtcatctttcctgaatggtcttgatgcttgaggatattcgtcaatgtctaggcattgaagagttgggtattttttgtagtctttgcagcctaggcttctttgtacccattcttctaggaaaggcttttcatgtattcaaatggaatagagtgctgtgatctaagtttttttgtcactgcaaccttatcagcattaggggacacaccaagcccagtaacactgacttgcagattcacagaggtagtgccttggtggtcttgggtaaaacctgagagaattctctggattaccaggcagagattcctgttttcttctcttactttccctcaaacaaatgaggtcattctcctctgtgctgagctgccttcagctgagggaggtgctaccaccattggaactgctctggttcagacttagagccagcatagcactgggtctctctcaaggcccacagcaaccattgcctggctcccacctatgttcattcaaggcccaagggctcttcattcagcatgtggaaatccagccaggcgtgtgtccttctctttattgatgtgagctcccttcagcccagggagagtccagaaatgccatgcacaagccatggcctggagtcagaaacattaggaatctacttgatgctccattttactgcagttgagctggtagcaaagccacaatacaatgttttttctactcctctctttcctcaagtaggagtctctccctgtgtccaccatagttatcaatgttctgggttacaccagaagccagtactgtatgcgggtctcacccaagtcccatggcaagtactgcctagctatctctgatgtttattcaggacccaagggctctttattcagcagaacttgggttctcaccactgggatggatgactcccctctggctagggctggtataaatgctccctccgtgggttcaggctgaattctgccatgttgctttccactctgacagacagcatcaagttctaatgcgaagtctcacaatcactgtactctttcaaacacatagattcttcataccacgtggctgctgctgggagatgagagaggggtaacgtaggcttcaagactgtctttcctaccctcttcagtacctctttcattaatatgatgtcaaaacaaggtactgtgattactcacctgattttgttttttctggaggtgctttcttgtgtggatagttgttcaatttgatgttcgtgtgggggaaacaaatgttggagggttctatttggtcatcttgttccccctccctaagctcctctgtagattttgaataccaatactcgtgagcttgttacacatcagtaagtaagaggtgtagaagaaaggaaatagcagaaaagacacttgagattctcagtcaggattgcgcttttagaaccaactctctgctctgagcctttatgttgtgagacgataaaaatgtaatatttaaattcatgctaagccgaagtgccagaatattaactaaatgcaggtgatgttatcttcctcccacaatactattattttaactgatcttaaacataaatggaaacacagctccagctagcacatttcctatatttaagccaccccatcatgaaaaaataaataggttcatgtaggaattggtaaagttccacagcttgaggcagaaattactgtttggtagcctatctgatcagttatttagacacattcgtaaacagatcagattattgatccatagaactaattgattcaagaaaacggcatttagtgaaattgaaatatcagaatttatgtcctgtctcagaatcactgggccaaaaaacataacccaggctttagtattaaaagattggagcagcaagaatttgttatgcatccactctgtgcctgaggctctgctgagcactgtagacacaggcagagtcatatactacagacagaatgttaagggtttataatccaggggatttaagttaaataccccagaatctatttcactctaaaactgaatgctaacatgcccttagtgcttttttcatgtaactcagaatgatccttgtccttaacttgggtaagtccgaagtttgacattcaggctactggtattttctcatcacttgacaatacataaagaagttaaacaaagagagtaatcagttttctgctttttgtttctcaaagttcaattttcattgccctctatagctgaagatatacagttttctaagttgtgagaaacaaatcctgtttatctatgattttccttaattcaaatacatctgtgtttagttgaaaaaaatgtgtatatgtgtgtgtgtgttttgtcttgctcttttacttatcccttcttcttgtccccagccctctgcaccagacttatttgaaaacatttttcctgggggaaaaatatgtctttagaaaagtacaaaatgcccaaaggtaggatacatttaatatgaaagaaataattattagctaacttaaatacctaatttccaagttggcttactatattggcccacatagaaagagacacctcttctgattaaagcaagcaagaccatttggtactatcttcttggcttctaatcatcctctttatagagtgatactactgacagtgggatattatacatatgaagtgtattagtcaggttctctagagggacagaactaataggatacatgtatatatgaaagggagtttattaaggagaattgactcacatgatcacaaggtaaagtcccacgataggccatctgcaagtcgaggagcaaggaattcagtggtgaatcagcgcgagtaccaaaacctcaaaagtaaggaagcctacagtgcagtcttcagtctgtggcccaagagcccctgggaaaccactggtgtaagttcaagagtcccaaagctgaaggacttggagtctaatgttcaagggcaggaagcatccagcttgggagacagatgaagaccagaagactcagcaagtctgctcttccatcttctcctgcttgctttattctagccttgtgggcagctgattagattgtgctcacccagcttgagggagggtctgtctccctctgtccactgactcaaatgttaatctcctttggcaacaccctcaaagacatatccaggaacaatactttgcatctttcaatccaatcaagttgacactcaaccttaaccatcacatgaagtatgtttgtaaataaaaatgaactctgtatcatgataatccaaggtgaaatggacatttacttttctggcaagtctgggtgttttctgcttggaaagcaatggcactaggttgcatatacagcctctaacaagcaagctcctgaaatatgatttctcattgagcaaaatggttattccacacataactgcagtttcagcagtgcctttttgtttctggttattaatttctatttaagttgtgccaaagtcattaatttactgagccaacatggaaaatgtaaggcagttaactttataaatgacaccatcatgcttcagtatatttgtgcttaatgccattataccacgtgaaagattctaatttccttatacttgatgtaactggtggtattagaatgctaagactgtggtagtgtttgttgctttaattgtactgaactgactagatacaagtagcccgttaagtcctcattgtccaatctgaaaactacattattgttaatttttttcttttggaagcatcaagctttctcaatattgtgacacttacattactgttgaagtctttaaggagagaataaatatgctaataacattctagaagcaactaactctaagcaaaagtgaatagtacagcactatcaaggtgtacacttttttccctggaaaattatctccatcaggtaatgggaaagcactgctctacagaaaagcaaaaaatgacttataagcttgattcattgttactttaaaacccttcatatctgaaggttaagctaacattaaggcagtgtacaactatcagaacaatatttcatatatttgtatttagatgaatcaccagatttgttagtctctgaatattttctatattgagccagattttagctgccatttttgtgttttaataaggttttcagttgttatccaaatatgacccagtacctgaatcaaaacagcaagctttgaggaataggtcagtatttttggataaactaacaaaaaaaatgttcatcaggctaagacatcagcagtatttgtggtagaattaatgagtattgttagtgtatattttaactgttaatagtcaatgctctattttttctatgaaaattcaacttcctagtcgactctttgcactccttcattcacttattattttacggatttccctcttgtgtcagatctctagaaattctcacttttcatctggttttacaatcattttctatttttctcagctctagaaaagtctctaaacaactccagggcagaggatccatttgtttaacagtggcttcttgatcaataattgcatgcatgaaacaaagtatcagaaatagtttgctctttacactatcaattggctgatatttaaacaaattgtctttaaagtcactgccgcaattttgtttggcaatggcattttatttaattcatttattaaatgagtttccaaaaattaagacctgaataatttatgacttcttctaatctcaacagaaataagtcaatgctggctgggtgcagtgactcacatctttagtcccaggtacttaggagggtaaggctagatgatcgcttgagcccaggagttgaagactgcagtgaactctgattactatttcactccagcctgggcaacggaaggagaccccgtctcaaaaaaataaaaataaaaagtaaaagaaaagagaaagaaataaaacaatgttaatctgtgtcttggcacgaagtttcacacttccatcaaatgggcatcattttgtgctgctaatgtctcttagggcgattttaaaacaaactaaaaatatgaaacactggatagtgttagccttacctagcttgattttctttgggtgtacatgaatgcaaataaattctacaatttcttaaattcatatatatgtatatatgcacatacatatattcatatatatgtttatgtgtgtgtatatacatgtataggtatggtgagtacatatggggaaccagttgaaggatgtttcttcttttacaagaaaggagagaaaacaatcttcccgaaaagtggtatttactagcatgaaaaaggattgagcttcatataggtagacattactgtatttctatcatagggttatgtgtgtacataatccaatctgtgtttataattcacatacctactctccattattttgatgattcaggaaagtaatttctcaaaatttttccttttgcaaatgtgctttttagataactcactggacctaaacacttggcaggcattagggtcgaccttccctgctgggttgaagaggctctttcatcccccagacctgcagactgaaagtcagccaaagtgctagagattctggcccttatgtacctgctgcctatggacttgagttttacagaaagaaagcattacttggcaaaaacctgctgatcatgtctttccccttggaacctcacagcacaaggcccaggcttactttttgattcagtgatggtgaattgatggactattatagaacttttcacttctgtgaagcagcattgtagtatcagcaccctgcatttctcttaaaataaaaaaaaaatcacagtgattctaggttttaaaaagttgtattattctgccaaaccatcataaaatgctgaatctttctagtcaattttattgcaaataactactgctaaaataaagtagaattaggtaagtaacttttttgataagcatttacattcttaagatgtgctactgttcagtatgtgtgaactcctaagttgccagtacagtgggtgctattgctatactaacgcatttcacctgtcctttacctcctcttccagaggtgcatactacgtgaagttttccaattgctgctgctttatttgcatttagtcacccagccaaaggttctcacattttatgatgctttataaaaagcttcaagagcatattttaaaagcaccctgtcagaccccatgaatacacactctgaatcaattgttacagattgaggccaacaaatattcattttttcaagctttcctggtagctcttactaattcatccaagaacatcttgttgaggaatacacaaaagattttgactgcaggattaacctatttataccaaagctttgtattcctggaatggagcagttgcaaatgctgatgactattgcattaattgatgctttgagatgtagcagtactcaacctgttctctaacatctgacactctgtgggaaaacaaaccaacaaacaaacagcaagaaggagtggttgaaatagcaaatagtcaacctggacagtatctggcctcccaagggaggcagaagtagtcctgagggatcctggggtcaaaatgtggttgtgaaacccagagaggggataagggctgggtgttcagtaggaacagtgggaacacgtgcttctggttgctgtttccttttcacttatcagtttacacgtttctaagcttagagtggggtatcgagaagcagggtctcattgggcatgtattatgctgagctcagctgacttcaggaaacatagcaaagcattataaactgtaaggaagaagacagttacgatagaaaattttatgacaacgtaatgtatctctcatggaagagctgggggatgtcctagtataagaggttctagagtcagcaataagatgtgagagtcctctctctctctctcgctctttttttttttttttttttgagacagagcaagactctatctatctccaggctggaatgcagtggtgcaatcatggctcactgcagcctcaaccttctcccacctcagcctcccaagtagctgagactatgggtgtgtgccaccacacctggctaagtttttttttttttttttttggtttctggtagagacagagtctcactatatttcccaggctgatctggaactcctgggctcaagcgatcctcctgccttggcctctgaaagtgctgggattacagacctgagccactgtgcccagccaagattttcttttttaataacacaaagaccaagaggctccccaaacagaaaagtgatgaatgatatgaacttagtgctaggttccagttcaagaatgcagactgatgctgaaatgatggcacagattgaaaggccaaggacagtttctggcatcaaagcctagggcaaggagttcaggaggcagggggcggagactaaatgcacataagttgaggataataagatgacacagggcagtcactcagaattcagtataccactaatgtgcatgttttgaatgcctcaagtcaggccaaaactattagccttattgagcatgattaggtgtgctgcttttcagacagttactgcaattacatactgtgcagttcagttcagtggttggtatagttaagcaagggggtgcctgtattgaaagattgtggactaggtttgcctgtatttcttgtttaaaagttgattctactgttacatttgttctaaacagttgcatcagtttatattagcagttgatcatctcttgcccattgaaatcaatgtgatttagaagcaagatatagaatctggagttaggtagtcctggggccttcatttaccacccttagtttattgtctgtataaatgtgataaattatgtttaccttataagtgttaaatgagtgagcatgtgtggatatgtggctgggcgcagtggcttacgcctgttatcccagcactttgagagtctcaggcaggcagattgtttcagcccaagaattcgagattggcctgggcaacatggcaaaatcctgtttctataaaaagtacaaaaattagcagggcatggtggtgcacacccgtagtcccagttactcaagagtctgaggtaggagaatcgctggagcctgggaggtcaaggctgcagtgagctgtgattgtgctactgcattccagcctgggcatcagagtgagactttgtcttaaaaaaaaaaaaaagaaaagaaaaaaaaaagaaaaaaaagaaagggcatttacttggaagcattcttggtattcagtaaatattcactgctttctccctttactatttaatattctctggcttcataaaatttgactcttatgacttctgtgctcttattcacgtgaggcttctatttaattatcttgtcaactactatgtggttgatttaaggtatgtgaaacaagcattcatctgttccacatcatgtttctccctgggaccacatctatcttatattaagtgatctttgaagcagctctaataggaattggtcccttgggacaggaaaacacctgctcctgctctctcttgtgctcgcacgtcccaggagtcctgacctgtgtattatcataggcaacaccacccaggacacctggccatcttccattcatggcctcccctttggtgaagaatgtcctcaatatttgtggcaattagcagctattcttgggtaacctttagttaaaagagagtagtctcatgggctaaagactaaaaagaagacgtgtaataaaattccagagaaacaagtcaactctgtcagtgtttatgtgaaaagagatctgggagatcagtgctcagccttccccaacagatgcacaatgttttgtagcagggaattggaaaacaaactttgacttgggattcattgtgtgactcttcattccaccaccaacaatctgtgtgacttcaagcaaaacagctactcctgaacttctgtttcctcctgtataaaaaggggatactgaagcatctaatggtttgttggaaggaatgaactgaagatcagttgtaatgctctaagacaaagctggcttatgataaatgctagtctcattctccttgttgtcttttgagaattgccctttgtttcttttatgaaaataacatttccatctttcccatcccactttttcttttaaaactgcttccctgtacacatggggcagccacccaatagctcctgaagggatatacatgtatctctttaaaggggatgcagctgtctgcattgtttgcattgcttgcacagtggtgggcactggtgtcataacccattgccatagctaagcctttctctttggtatggctggctgtgtgcatgcactagaactcggtatggtgtatttccccagagctcagtcaacaaggaattgctaaaatgaaatgccatttctgctgactgtaaatggaagaccctattttctttcataaatgtgtgaaaattcaaataattaccctactatttgatgtccaagttggtaaagatcaactagcagtaagtcccagcatttagttataacatatttgacttttgctttgagcccaagaatcttcaacatacttggctgtaaaatgggaatatcaaagctcatgtgttctcacatgatttttatggaaagcaaatgtataatgtacctgacaaggagacataggtatttgtgtgatggcctcaacatcatattaaaaccaccagtgattttcttattgatatgttaatctcttatcacatgggaacttttttctttgatggtcagtttgctttcatcttgaaagaaatcaattgttgatgtacgctgtgtgttaattgcttcgttaatactgctctggtacaataaccaactgtagctgaaataatttggcatgttcagtactgttcacgttggatagtaagtattgtgtggttaaaatgaagatatctatggcaaacttgcaacaatcccaaaacattgcttttctggttatatatccagaggcagttttttttttcccatattcattagtggtcatcgctctccacaggccattgcaatagataagtaggtagtaaccagggtaaagaattaggttgcctagaaggtcagtgaaccatacagaacttgcatatgactagctgatgcctagttgttgaggtgaacattgtgataaaatcatatttgctgggagtggctgacagaaaatattttgtgagtgagttaaacacctcacatcttgacataaggcatgtatcaagctgtttatgacagcatctgattcagaaaaagtacttttttcagtattaaccatccaatgcaaatatttaaagcctgcttttgtttctatcaaagagaatgttgggacagagattgtaaaagagaatagagcctgcatattttcagatcctactgaaatacagctaaacttagattgtttatagagaattgcacatttcaatattttagtatttgtcttactccaaatgtcgtttgggttgtctgggattttatccttggaatatattgcaagtgatctctgtgttattcgcctcagctcctgaattctgatttatcgtctctagtaagcaagccagtgagcatcacacaggagattctcagggctcagtcattcaagaagtgtggactgttgaaatttaggctttgtgtacaatctgggtaacaaaccgtaaaggcatgttttcttcctaaagctctatggaaaagtcatttgccatattacttcccccaacagcgtgcaccctgatgtggagagatgcagagtgtggtccaataataatattgaccatatgcttttctaaggcaagcagacatacagtagatactttaattttggtcgttggggtatggaaggaggtgggaagtggagaaaggagagtaacccattacctgtctggcctaagcttgttatgatctgacagatgggtagccccagggctgcttgcaaaaactatttctttttgtctccatcacagagccctggggtgtggtacagggagggttgaccaagagaggggaggcttccctgatggagtgtgaggtctggcagcaggacctgacaaaagtgagtagactgtctgggtccagccagctataaaaggaaagaacagaataacagctacagctcggtgggagttctagtacctggattttcacccaggtggatgccaggcctgattgtctatctcctgaggaatttccagactttgtcagagttcttcaggaactgaccagatccagtttgcaggttgggggtcatcactatttccattgggtcaaattggagtaagcagataccaagagtcacttacaaatcactaacatctattagatactgaccattctctcattttctcacatcaaccatgtgagataggtattattattgttcctgttttatagatgcagaatctgtgatttgtctggaaccacagctataagtggtgcagcttggatttgatctcacatttgattttccctgtgatccctgggatctggcttaggtttggatatgcctctgaacaaatggtaaacaagggaacctaaatgtccataggtgtctatttacctggttgtccttagttcagcatctttaaaatacaaaaatagatttgttgagaatactcatttccattattttaatgagaataacaactcagctaacttttaacatgaatatacactaaaaccaaaagtattatgctgatggcaatctctacttccttcttattaaagcttatgagccatggaggaccctgcccagcctgagctgcccaatgtgcctgcgttagccagcctcagtgtgtccctttgtaaagcgccccagaccttttgagtagggatgaccacttcttaattcatggtatttatcagtaatcatgcatatgcaaaattttcaacttctgcttagagcctttactaatttatttctgtgaatgctctgattccttccaaatgactctgtaagatgatggttgcaggcttcattagttcaaccttcagaatcactcaatgttacagtcccagttttctctctcttttacccaaataggctttacctatattaatgattgttgctgggctcttcgacaagatatttcaagaatgggaaaagcgttttaaaagaagtttcatgaggctttggaattcacaagctgtgagcagcactggcagatatttttccagggtgttcatttttattcatttccttatagcttttatggctaaccgttctaagacatatacagtgctgtgttgtgatcaaattttctcctctgatagaagtcaaactttgaaaacttagattcctagaattgttgaacattctaatcaaaaacttctttgagtcaatccagtttaaaatatcactgattgcgggggggtggctcacacttgcaatcccagcactttgggaggccgaggtgggaggactgcttgagcccaggagttcaagaccagcctgggcaacatagcaagaccccatttctaaaacaaacaagcaaataataataaaatatcactcatattttagttctttctaacccatggttgatactctcaaccacagagtgaggaacttactttctgcctaccatttaatctttgatctctaaaggtttggaccaaatggcttttttgccgtaagcttaaatatcttgtcttatttttttttcctacctatttgtccaggttgttttctttgcatttaggacagtggttctccatacgtgtgcatcaaaatcacctggagtataaaatacagattcctggggctggctgtggaatctctgatttggcagggtttagggagaggcctgaaactgcatttttaacatgttcctgggtcgtattgatgatactgattctcaccttgggaatcactgacctaggaaatgtcttctcttcatccaaagaaacccttacaatccccaaagatgcctttttttctcctggctgaacaaccccaatttctatgactttcctttttagacttcagcttctccaccatctcaccatccacacttcttgcttgcctgtcctgcttgcctatcactcactgaatttcagggagccaaactggcaatataaatgagtgaaccaccacaggtgggggtgagatgagtcagatagggaagacagcagagactgtctacccggaatcaactgaggaatgcagacctcacccaaacaattcacattcctgtttttttgtttttgtttttgtttttgttttttttttaagcatcaagcctacctaataaaatatgaattataaaaaataattcagttgcctagatttgaccccaatgaatgatagtttgaggtcttaaaatataattaaaatgcagcttgaacctgaaagtggcagactatcaagttattatccccagttgtttgggtttctattacatgaatccagttataaaaataacacttaatacattataaattcctaattagggagctacccagtaactgattatattgacaaagtcatgccataaataagaattaaaaagttaatataattgattagctaggatgccctcactcttgtttttgccattatttaaaatttaattgctttgcaacatttccagatgttgattttggacattttttcatgtgttttattgcctgtgagcagtttttatgtacttgtaatcggagcttttcacgtttcttggatgtagaaaaatcaattaaaatgaagcaaatatttttgaaacctaaccagacttttgtctttgttttctcataaagttcctccatagaaatgtgtggcatgggaacagagcctaatactttctgaataagatattaacaggcttgtagtggatgctgggaatttagaaagctctgttttttttttttttctaaagcctcccagtagaatgtcagactaataaatggactgcatatttccacagtgtttttatgacatgtttcacacactgtcttggtgcagatatgagaaagcccttgtccacagcccagttctgactcactcattaattttaccttgtattcagttttcttggggtggatctagactagaatagaatagaataagccgacctttaactacagtccttaaatgaggaaatctccaccctgggccagctgtgccaggaatcccgacgagatggaactccgctgtggtttataggcagggctgattttcaggggggagtgcacccatctggactccctgctgttcccatcaatctattccagccctggtacccctggaccaccctactgtccagcaactaaaggattaacaggagccacctccaggagcctccgggacccttcagaaggtgtctgatttgatggatcagaggctaggccactgccagctctctgcacatattttacatatcacccatttgcaggtgttgaagaccggtaagtgcccaggagctggcaggtgttgcaaacatgtcagtgtacctggtgggggcgctcctgcccagctgataggagacagcttctacccagcccacccctttggtggctacaccagcttggcacagtctctcattgctgaagagcatccccccgccaactccgcccaatccccacctccagtcttgactacttttcattggtttgtttgtttaaattgacatctcctgattttcaaaaccttgctgattaacaaagcaaaaagagcacacacaaaaaaaaaaaaaaaaaaaaaaaagtcaaaaacaaagcaaaaaactctcagtctaaaacagataaacaaaccaacaaacaaagcccaggggctgctagaggttgactcttgtaaactgcaagaacggacaccacaaactccagagcagagggcgcctggacattccagtgacttcatcaagcagtaaaatatccgtctttcatctgcttctgctgatgaccaatactatgcctgtcacaatttccagtcttttagagctactctttgattacacacaaccgagactttttctaagcctaggacattttctgtgtccttttaaacattgtttacatcaaaataatgatatggataggtaaaagaaaaatacaaaactacttgtgctgtaaagtagttctattttagaaaaggaaatcttgacaaaacttgagccttgttaggaaaaaagaaaaatgacaaagcagtcatgtacagaaagcctggataggattttcaatctccttgtgcaaaatctggcaaaaatgtatgctaagggtccaaagcaggaagtgctcagaaagcaaatacagaaactcagcttagcaaaggggcgaagccagagagggatataaaggaacagaggaacggctgaggatagaggtgaggaagctggactcacacagactgggtcttgctcagccttctgcagtaccagtgtcagggccaggcacacaggagtgactaggagtttgaactgaaataatgcatgactaagaattaatttgggatggtcttcaggtggaatgattggaaatgttgttttacttttaatttttcagtacatgaaagaaaagatgcctgttttctaatcattgaaatcttattatgtacagaaattttcctagcagagcacacgaggatgaaaaagaatcagatgggagatgaggatcaggactctttctgtgaatcggaacctctctgctctgctccttttctggtttcctctgtctgtccttctcttgtctccattattcatcctgtttctgccttgatgtcatcttgttggatgtcccatctcacttagtcgtctgtaatttgtaagtagcatttaaattatttgtggtctttatctaataaagctttattctctctggtcttgatgaatgaagaaggcaaactgagccttgttttttcccttattgtcttacttccccaaagcacctgaatgagttctgtgtggtctttattgacctgtgatgatcactgtcccataaaaaaagcatggtagcgtagtgcttcagcataggctctgctcagaagacttggatcccaatccttactcacttgtcgagggagtttgaacaaataagtgaatttctattgacctcactctttcacatatgtataaggggaattgtaatagtacatgtttttttaggtcattaagaggattaaatagatagaatataaaatacgttagcataagtgcctgggacagggagaatactcagctaagttggaaatcaggtgttggcaaactttttctgtaaaaggcaagaaactaaatattttaggctttgtgagtcaaagtctctgtcttaactccttaactctgccattgtaccgtgaaagcagccacagacatatgtaaatgagtgagtgtgggtctgttccagttaaaccgtatttacaaaaagggacagcaaataagatttggctcatgtctctcagtttggcgatcctattgtagaatatagttttgacatactggaaacagcttctctgtaagttaggatctgctttgttgctaactaatttaatgtgaaatttaattgacctatccatatgctacatctgacaaatagtttggcacacaatttgcttagcctttgtatctcgaggaccagagaagttaagtacgtttggccaaaagtcacccagcaaattgatgacagatctggggcagagttcagggctcgtgttctcagttctgaactatttctttttttttgaaatgtgtgttatcggggacgtagctctgtgatatcaagagactgggactgaagatctagttttgccagttgcggaacctcagatttgtaccactcactatatttggacctcagctccctcattgtcaaatagataataattcccatctcacaattttacagtgtgaaaacaagaaaatgccatatatggaaaatgccatatatttgaaatctctattgctgtggttggccagcttccttcctgccttccttcttctccttctccttcttcttcccccaccctcccctctctctctctttttctttctctttctctttttctttctttctttcttttctttctttttcttttctttctttttcttccttttctttcttctttctcctttttcttttattacttaattaacaaataataattgcatgtattaatggggtacaatgtgatactttgatacacacacgcgcacacacacattgtagaaagattaaaccaatttagttaacatttatcaccttatctacttataattattttggggatgagaacttttaaaatctactcttttagcaattttagctatgtaatatatttttatcagctatggtcaccatgctatgttacaacttattcctactgtttagctgaaactttttaccttttggtcaacattgcacctttccccattctccctatcaacctctgataaacaccactgtactctctgcttctatgagtttgacttttttagattctacatgtaagtgaaatcatacagtatttgtctctgtacttagtttattttacttaacataatgtctttcagtttcatccatgttgtcacaaatgacagaatttcttttttgtgtaaggctatatagtattccattgtgtgtgtgtgtgtgtgtgtgtgtgtgtgttttctttatcctttgatcatttggtgggcaattacattgcttttataccttggctaatgtgtataatgctgaaatgaattatgagtgcaggtatctctttgacttacttattttaattcctttgggcatatactccgtagatggattgctggatcatatgataattctgtgtaatttggggcgggggaaccactacactgttttccatagtggctacactaatttacatttctatcaacagtgtacaagggttcccttttctctgcctccttgccatcacttattatctttcgtacttttgatattagctatcctacaggtatgaggtaatatctcatgttggttttaatttgtatttccctgacaattagagatggtgaacttttttttcatatatctgttggccatttgtatgtcttcttttaataaatatctattcaggatctttattcactttttgatttggttatttcttttttttaacattcagttgtttgagttccttatatatgatggatattagccccttatcagatgtatggtttgcctatattttctcccaatcaggagggtgtctcttcactcacttcgttcttaattgttttctttgctatgcaaaaagtttttagtttggtgcaatcccatttgtctgtttttgcttttgttgcctatgcttttggggtcctatccaagaaatcgttgcccacaccaatgttgtgaagctttttctctacattttcttctagtcattttaaatttcaggccttatatttaagtctttaattcactttgagttgatttttgtgtatggtataagacaagggtacaatttcattcctctgcatatggatatccagttttgtcagcaccatttattgaagagactgtgctttccccattgtatattcttggcacctttgtcaaaaatcaattgactataaatgtgtgggtttatttcagggctctctgttctgttccattggattatatttctctttttatgccagtaccatgatgtgtgtgctattatagctttgtaatatattttgaaatcaggagtgtaatgctgttttgctttttttgctcaagattgctttggctatttggggttttttttttgtttcatataaattttagaattgttttgtctatttctgtgaaaaatgccattggaattttgatagagattgcattgaatctgtagattgctttgggtagtttggacatgtaaatgatattaattcttctaatccataagcacgggatttctttctgtttgtacatgttgcctttaatttattttatcaattttttttggttttcacttcctcaattaaatttattcataagttttctttttgaaatactattgtaaattggattgctttcttaatttcttgtttgtatagtttattgttagtgttataggaaatgtactgatttttgtatgttgattttgtaacctacaactttattgaattcttttatccattctaacaactttaggtgaacactttagggtttcttctatataagatcatcagcaaacggagacaatttcacttctcttttttatttcaatgctttttattgtctataaatttattgactgctctttaatctttcacctactttgtaagataaatttagtgaaacaggttagacagcatggaggactctgatacaaaacgattttataaaaacacacagatataaatgttttctgattaatggccattagctagtttcccaatcagagcacgttttcacctgtgctctttaaattgctttcaatgtagagttacaaaatggaaacttaagggtcagaaaaggtcaaattacattaatgacagtcctcatgatagtgttgatttaatcaggatgcctacctttgttcatttaccttttaaaaataagtataatatattgcagatcactaatactgctgttagagaaggtggttattgtattaatgggatatcagtaaccttctctctactgtgacatggattactgtaattatgaaagagacataaggaaacaccataagcactatccattgggccccaggcttcattagttctcatatggctgtgtaaaaatgctaattacaaacatatcgtaataaaaagggtatggcttaatgccaacatgtacctgctaatttgatatttatgatggtagagtgaagcacatataatcaaaagcaaagagacttcagtagagcagcattctgtattttgctgactgaagaaggctgtgagattatccagccatttatttaattaaaataatattgactggtgaccatgttattttatttagtagatgtgtaagcatattcatttaattttcaatatttatatttcatgtgattataaaaatgataaaagctcaatacataacaggtagtatggacatgtacagaaaacaaaggtagcagaatcctctaaactttagctgcttcctggtctacatttatatgcacctttctcactagaaaacatatcgattattttctgaattgtaattgttcaatttaaaaataattttaaataaggaaatgttggggaactgatatagctcagtgttgaggcagagatgttcctctgttcatatgttttggccatttttatgtgaagctgtagagaacagtgactagggtacttgtgctaacattgtcctccttattaaattggacatacatcatattttagggcaaaatttcactttctgatttctcagaaagcaaaagcgatatcaaaaagtatatcaatctacacttacatagattgattataacattttcatttattttttttttcacaaacactcattgtgttctgtctgtctttggaatgagatatacctgaatttcagtctcagctttgctccttaacaactggaaggtatgtccatgtaacatgatcccccaggcctcaacttcctcatccaaaatctatagattaaaatttgtcttctcaggtattgtgagccttttgtgagatcatctttatgaagttcctggcaagaacaggtactctgaaactgttagccagcataatgtcaatatcacctcctattattagtgccatggtattttgtgaagtgtcttattaacataaatatacatgggtaaacattttcacaaggatgtctgtaaaaaaaagaaatttctagtgaatttccagaattggaaaattgtggaatttatccttcatcagattttagctccaatggtgtctacctgccagagtgctttgaaggaagatccatggagtttaagataaagttagcttgttttacagtacctgttacttttataggtttttttacattttaatagctattaataatataggtatgattatcagcatgaagctcccatacaaataagtttatgttgaaagtgtcaatcgtcattaatatcccataagaagaaactatttaaaacttcataggagttcatacatggggttcccatggcaacaatggagcttataatttttaatttattgcttaattttctctaaactacattgtcattgcatcggcaggaatcccagtctgtagtaatgatggggattaaatggtcattatgaagttgttcaacattcttgtgatttgcttcagggaacattggctttgggtatctttgaatgtactattaagcattgttaaatccatttaaaatagactgagtttacagggaaatgaagtatattttcttattgcaatttatcatccagtaataatggtaaatattgcaagtcaaaatttaaggccaaatgtaactcaacagtgagctgactaatggctgtcttgtgcttaaagaaagtatattgcttttgcatttaaccaaatggtcattgaaaagtataaaaagatatttaatagctacaagtcatattccagaaggattcaatctgtaatataaaatgagccaaaggaatcggttgctgtcttgttaaagaagataatcattacctgagattttatttttcttataagtatctcctcctatgtcaaggtcaaactgatagcaggttagaggtttgtgtctatggacatctattttgcaaaatacagctattcataaactaatcctgaaatcatttaaaatattgcaggatcaattcaacatacctatacagtgtcaattcagggaggtcaggaaagtctgtaagggagaaatggaatattagctgggaagcatggggagaatccaaacagaagggaggcagggaataggcagaagaatgacagacatgaataccattggcagaatgtttgtggtgttattgtaagttaaaatgttaagggagaaggaggcatagaaatttgctttccaggtgggaaatttgatcaagagtctatcttttaggaaacagacaagatggaatatagatcttccagcttgtagtatgtttcaagtgttttaagaatacaacccaaacattatcaagtgatgttttaggcaaaggagaaagtaatgtgcatgatactgaatgttcctgtgagcatcaaggaacgtgattagcatcgggagccctgtgaaattgtctaggtcactcacatacctttgtgttcctttaggattattacaaaaaacactcctatcaaggtagtttagaaaacatgatctccatttaatagaaaggggatattttgtttttctagagtggtaactgaaccttgataaggaaaatatgcagaaatgagtgaaaaatggggccaagttgttgactacattgaataaaatgttagtcaacatcaaagtccttttatgaaggaaactgaattaacatgtcatttattcattgttacaaataattttcagttaaacaagtgaatattttctccaaaatggctctaaatttaattgtcatctaaatgtttgaatattttggcttttttagtctcctgtgaacatgtctgttggtctatggtgtctcacggtgtatgtgctcctgtgagcatgtctgtgtgtatgtctatgtctgtgtctccgtatgtgttgtatttgaaagtctaaaataggaggccctttaagagaagtgtttatgatgttaaaatctcaagtcttttcatggaagtgtgtctgcgcaggtaaattggatgtatatttctctctgaatgatctgactgttgggtttaataaggctatagctgatgccagttgtgttgaggagtttgcaaatttattgtcaaataaactctcctcttacactgttttgagatcattcctttgggcttatgtactttttcttcacatgtaagtaaaatgccacaaatgcttactcttgaaatcctgagagaagtggcatattatttttatgggaattgtacgattcttaaccactgtccttgattaaaataagagccttttttccttcttaaacctgatcattttcacactggaaatgaaatctttcatggggattagtttactcactcaagctttccattcagatgaaggtgtgaaaaatacatgacaagaatattatttaaatgctcaaacttctgcatgaagagcatgaaacaagaagaaaatgatagtctttagctgtagataggtttcaattttttttagtaggcttcaaattccttttaagacaaacaaaaaattaaaatagaagaccaactatgaaaataatgatttgatttaatctaaacttccatgaaggctgcaagttacagattaggtgcatcacctgaaagtaacattgctgattgcatagctttggaagctaggttcaatgatgtatatgcaagtaactaagtttcatatgcaatggttctctattgcactcaggaaattagcctggcatttaaagccattcatcatccaacctcctgaccactccaacactatcttccttcactctctcagcactccaaatatctctaactgcttgcagtttcctgaatatattactggttttcaagtctctaaaaatgttgctttccctgtctgtcatgttccttttctgttgttccatctattggactcatcctttaggatttcattccggaatcagtttccttctccaacatcttcctttgggttacctgggtggctaacgccctctgttctctcatagtaccctgggttcactccagtcatagttctttatacagaatattttaagcatgtttatttttctgcttctcttattaagtagagagaatctaagaaatagaaaccatgccttcgttagttttttagtcccatagcatcaggcttcatccctggaacatagtaggtgctcagtcaactttgttgagatagactttgtgagatgcagcagaatcaaggaaggtaaatgtcctgggttctatacagagggagttaaaaatacaaataagaagaagtcactcttctaaaggaacttgaaaaggaaaagatgcataattatcttaaatataaagctatgtgtggatgctgtcagatgttcacctggaaagagtcctggaatgaatggagcaaaaaattcaaatttcttttcactgagaggtggtggaaagccttcatgaataaagaaacatcttgagctgagcctcaaggatcctataagagttgtttattgtttgtttgtttgttttagtggatatttactgagctcacatagcctgtaagaatttaagctctgtattaccactatggttgacaagtgtgaatttaattagcccttttcaaaaaaataataaaaagcaatccattttacctacctaaacacaatagaatcatctaaatatcttattttcagtggttttctgatagaagataatgcacttattctgaagtcctgtcccctagcaacactcttcttcaccagtctgctaatggcttggcagaagaggtaaactcagttttggggcaaaagttttttaagcaggaaatcatgcaaaagtataaacagcaaacagattttaaattctgaaggttcctgggaaaagtcataggatactgaatgctttgtcatggctatacagatgaaaacatcgctaaacagagtgaatcataataatggattttgtaaggaatttctttttttttgttttgttttgttttgtttttgagacagagtcttgctctgttgcccaggctagagtgcagtggtgcaatggaatttttaaggcatagttctctgtttgcttttaacccaagcaagaagaagaaataggactgtaagagagacaagaaccctatcaatttgaataactcagggaatagcaaagtatttgactttgaatgcaggatttctctaaaacattgaatattgaagagaatattttaaggataaagaccaacattcagttagttcttgctcagtaaatgtggtagtagggaaacaagttcagcatgtgatctaagtactggcacatgaatgaacagcaaggctcataaacagccaatgagaaaatgaagctcactgttaatatgggaaatataaactagaataaaattatattggaaaaattttaaaaatatgtacaatacctggagccctgggggtatggaaaatgtgtactataatacactgttagcgaggttagacgttggtgaagtctttctgtcttgagacaaagtgaattggcatgctatttcctgagagaggaagactgggaaagaacaaggtatagggaagtattaaaaaactaagaattctatttgggaaattttaaaagattattatcaagaattcaggtggggatgtcaaataagccattgagcctggagccccaggaagtggttagtgctggaagaattggagtcaccggcatagagaaagtacatgaagttatgggactttagttatcaatcactagtttcataactagaggttggttaatggtctgctattgcagggtgcactgttctcagaatttgtgtggatatgataacacaagtcctgagttccaactttaaggagcatgaaatcttgttttaaatacagaagcaccgactatggggcaagtggtccattaaatatataaagcaatcacttcccctttttttgtacctttagtaggccagcactttgcatacattggctataatcttcacatagacatgccgaggtagatattttttccccagttttactgataagaaatctcaggctctgaaaggataagtgaattttatattaatacattcactggatagtaaatggagttgctggatttccagtcctggtctatctcattgaaagcctgttctcttttcaactgcctttcagtaacaggtgctgttgtcactgaatccttagcttcctgacccatactatctgaataatgatccctacatacttctaggaaagaaagatatcaactgcaattacccctatttgacagatggagatcctggattgctctaagtttaagcaaagcaattaagcttggccaaggtgtctgccatgggaaagcagattcactccattgcttcttagattcaaatactgcaatgtattgattattgcatgaatatattcagtggcttgatataacaaagtggcccatcactcttgatcattctcaatatcagtgtgcccaaaccctcaaatgacttgccggaagcttatatattaagggaaacttccagaatgcaatggaaaatgaaactttgtttcactagaatagattctgttcttgaagagagaataggacaatagatttggttttcatggatcaattctcattcttcaaaacttctgcaattatctgtcgaatttaaatttagctcaagtgaacactagtttccaggatgggttcaggagctcaaacttgatagctaaaggagaggtgaatggctaaaatacctccattcttgtgagcttaaatttatacataaaagtgtcaaatcactccacaaaatcactgagctttcctttttattttactttttacatttaattgctgggcagttgaacattacagggcaggctactgcatcagtactaggtgccttgctctgccatcattttgtcagttgttctgtgtgtcaaatatattattctgtttgcaaaagtcagccactgacttttaacattgtcatcatctcattctattccccactcctttttgggcagagtaaatctttctaaagacaagggcaagagaagtcactaagttattggctgccctttttcactgaacccaaagagaatacattgaagtgtcaagtgagtgagcttccaccgcttctcagcctatcatcattactggcagagaaaccagtaagtcaacccaagacagcaacggagatatgtaactatgggatgtgttgctttcaagagaattgcaactcagagctctttctagcacgtggaatcaatttaacccttttatacataagccaaagtcctcccttcatgactcagttatttgagttaataaagctctccaaatctgtctagtcctttagctaaacagtgttaactaaaccatgtgaatctcctcctctaattaacagctactttattaaaatgctattgccctgttgggaactagttggcagggtgacagagaatggagtttgtgctatggactattgattttcagttaaattcttactgtgctcttggctttctcctgcttgtggcttaaagtacccaaaccattcaggccagcaaaagaggccactttgctctccctggtttttattggcctcttttcagaaggtctaattaacctatggagtcttccaaatttaccgacagctctttcatattaatctctcttctaatataagaaatttcttttttaaccttccactcaaaaagattatttcaaaaagtgcccacaactgaaggagtgacttaatcaggttctcaaggaaaatgcctctctttactttgcaccttaagctctgccattgttattttatgttttgtgcatatatgaacttttcattcctgtctttaaaatatttatcagtcatataaaatttggataatggtgagaagcacaaagaaggagataaaaatcagcaaccagataccaactacaatattgtaaatatttaggcaatatagtccttgaggacttagattttcgattagacatcactgtcattcattacatcagtaggtgaatgagacaaattaattcaggaagctataaatgatgggaaatctctggtatgtcaatgtaggataggtgaaggctggcaagagagttctggtttagaagtggttagaaaagatctctgtgaaggctgaggaggagcaatctaggcaatgcctccaggtaggaacatggttgtcctgattgaggctaggacctttagagtcatggacaaggtaggccgtggttgatcttaggttagtaatgcaggagaagacagttcatgtatgcttttggtactatggtgaggaattcagattttattttcagtgtggtgagatgccattattgggcttcaagcaagggacctatatgatagggtctataggtttttgtttctctcttaaaattttttttttttttttgagatggagtctcgctctgttgcccaggttggagtggagtggtgcaatctagtctcactgcaacctccacctcctgggttcaagtgattctcctgcctcggcctcctgagtagctgagactacaggcatgcaccaccatgtctggctaatttttgcatttttattagagatggtgtttcaccatgttgaccaggctggtctcgaactcctaacagggatccacctgtgtaggcctcccaatgtgctgggattacaggcgtgagccacagcacctggcaaaattttttaattggtacataatatttgtacataattatggagtagatgtcatattttgttacatgcatagaatgtgtaatgatcaactcaggatatttaggatattcatcacctggagtatttatcatttctgtgtgttggaagatttcaagtcctctcttcttgctatttacaaatgtacaatatattgttgctaactctagtcaccttattctgctatgtaacattagaactccttccatctaactctacatttgtactcattaaccaacccctctttatcactctcactcgaaccactgccctttacacacacacaccctccccagcctctggtatgtatcattttactctctacctccatgaataactctggctgctgtatggagaatggattttagagagcaagagtgcaagtagcaggggggagatttggagtcaagagatggcagtacttggctgaaggttggtagtgagaggtaagaaaagaaaacagtcaagaaaaatgatatttttgcttattcatattaggaaaactaggtggggagctagtttggggaaggaaagcaaataagagttctggttttggacatgtgaactttcaacttggttatagtagtgtggaattcaagggagaagttaggattcaagatataaatcaactagtaaaggagaagttataggagttattatagtatttagccttctaatctttttcatggtttgatttaatatttttagaaaagactggcactctaatatctgtttatgccctatataacttatttattaaaacatggtatgtgcatttatatatctatgtatagatagacataaaaaatattttcatgtatatttttatataagtactatattgcattccattgtatggatgctaccatttgctaatcagttctctacaactggacatttatgctgttatattttattaatttataaatgtggtagcttttcaataaatcttgacaaatattcagttttttttctagaacaaattttcaatgagaagtagtactgggagaaattttaagaatttttatataaaaatacgatttgcattccatatcagacacctaatgatggatgctcaataattatttatttgcagactgattacagtctcattaggattacataaaggtgacattttctcttggctttggcaaaaccgaatagtgcaatttataataatgtcaattttgtaggcaaaatagcttatttattttacatatgtaaaattagggaaatgttaatatttttcatacttttcattaggcatttgttcttttgtaaacattcactcatagttgtttcctgcttttgaataggtgatcatttttttcctcattgtaaaaactctaaatacatatagaatatttaaatttttatcataaatatattacatacttgttttctttcatatttgttatttacttcttaattgcatttgtgagtttcttttttttgagagggggcgtgacagaggaatgtacaggagactttagtattttatgttgctaaagtagacttttaaaatattctaaaggaaaataagccttggaaatctaagaattattttttgtgaattgaaaaaattctcaatattccaacagactcaaataaatagctgagtaaagctaagtacatctagtcaacattttaaaatcatcttcccatttgttttcttgctattcattttttatttgtcccatctgttctttgttctcttttcctgttttctactttttttagattaattgaattttttatttttatttttaatttattattaattttttttgtgatggagtttcactcttgttgcccagactggagtgcaacagcgcgatctcagctcaccacaacctccgcctcccaggttcaagcaattctcctgcctcagcctccccagtagctgggattacaggcatgcaccaccacgcccggctaattttgtatttttagtagagatagggtttctccatgttgaggctggtctctaactcctgacctcaggtgatccgcccgccttggcctcccaaagtgctgggattacaggcatgagccaccaggtccggcctgattgaattttttaatgattccatattatgttctttgttgacctattagctataaatctctgctttgtattttagtagctgttttaggatttttcatatatctctttaactattaaaatctatatttgtgatattataatacttcatgtgtaggaaaattgccttacaataagttttttcattttgcctctcctggtctttgtggtattgttacatatatttcacttttgcccatattataaatactatattgcattgctattatttttgtttaagcaatcaataattgtttaaggatatttaaataattatgtctatatatacacacatatatatgtatatatagaaaaatatatatatttactaatttagttaccatttctggtgctcttcattcttttgtttagatcaatataatcatctggtattattttccttctgcctggaggacttgctttaacatttcaagtagtgtgggtctgctgctgacgaattcatacaaattttgtaagtctgaaacagtctttatttatcttcattactgaaaggtatttttttctcagtagtttttttttattccctccttggtattttaaagatgtgcttgactgtcttcttgctcgcattattttgataagaaatctgccatctttcttatctttgttcctatgtatgtaacgcatcttttctctctgcctgtttgtaagattttctttttatcacagatttttaaaaatttgattatgatgcacctttatatagttttattctttttaaattattttttcaaatgtggcttctatttcaactgattgaattttttcttcctcattggtcttatttttctgctttttttgcatgcctagtaattttttattcaatgtcagacattgcaaattttacttgttgggagattttattattattcataaaatttttagttttattctggcatgcaattaatttacttggtaagtgtttcattctgttagttcctgtttttatgattcgtaggctggactaaggcagtattcagtctagaacttattatttccctctccttatatatgactctctcaatagtaaacaaaatgattcttaagtctgaatatgacttagtggcagtggcatccaaaggggcagggtgatgggagtgttccaccctgtagagaattttataataattgctgtgtttactgtaaaattttataaaatatgtataagcttcatattagcacattattattacttattatattttttatatgaaggttaattcagagaactcccaatttcataattatctcctagcacacatgggctcagccacagttatttgttttcagaataagttcttttgggtttatcattgtttaaacttgtgataagcgtttgttgtacttttgtaaatatttgcttatatttaccaccttctttttaatacgtgattgtttttgtttttctcattttaaaaactccaaatacataaagattattgaatggtgtgtttatcataaatatatttcacacttgttttcttttatgtttgttatttacctattaattgtattaatgggattcttcatttttttgaagggggaaagcgtgagagggatgtacagaagagtttcttcttttatattgctaaagtagcccatcttaagattttttaaaggaaaaaaaaacccttggaaaactaagaattatgttttggaaattgaatatttgtcaatattattcctcctccttagacatgactctcttaataataaacaaaatgactattaatttaactctgaatatgactttgaatattttctctttgtgcagcctaagattgctgcatttgtcttctttctatggtagtacctgttttcatgtaggatcgttcccctaaatgtttgtcaacatttggctgtctgcttatattaaaaatgctgtgcttgaaacctattccaaggctctccgtgggtaggtggctgggaattgtccatttggcttctctcttggaagatcccagtaggaaaccctcaacatcagtatcttcaggtcatattctttggagtggtcagagtccccagagaaagaaaacattcctccactcttctacagatgtgaaatacacttgcccatcaaaatatggagagatagatgaggaaagaataatgaaagtatcaatacataatctcgagttttgagctttttcttttctcacaatgttacaacctcatccaaccagactacctagaatagtgatcatggttgacatgtgcagtcctcacctgtgaatgatatacctcagtcctggggatttctgatttaccctttgcagggaattaccctcccatctgtttccatagtggtgcaaggtaattaacccagcagtgtggagtggcctaatgtgagagaaagttctgtttgtttcttaaccagattcacagaagttctccatttttaaaattgtgctttctacatcccaattttagaggtatcatttctgccattttctcagattttggaatttttagaatctaaattgagtttccatcaatttttctgacttctagataaactgttcacctttctctggcctgctgagtcagttacattattctctgctttctagcatccaaaaggtgttttgttgattcttataccctttgttctttttaattcatgccttcctacaattcctttactagagatttattgcagtttcatgatgaagttgacctcagtactgtattcagcttaccatcttaatactcacatatctgcaaacatctttccatagcaattatgtgaagaaagcgacgagcatatgtgtaaaattttatttcagcttcatattggtatctttatgcacacctgtgtagttcttttattcttataattctaaaatgttggctagatgtacttaggtttgtatagtcatttgttttgaatgttaagaattttcaatttacaaaaatactctttttcaagagtggctatcttttaggatatcttaatcattttttttcccactttttaaagatctggtattttcttaaggaacaattatctatatttcagaattctatactcatccttctttatatattattagtttttgtaactttgtatcttttgtttttcacttcccttctgaattctaaaaatgttcttgtgttttaatttttttaattttttatttttttattatactttgagttttagggtatattacttacatctctgtaaaatgaattttgcttaatactacttccagtgtaaattttgattctacaatttgatttgtactcttccttaaaatatttctttatttcacctatctttcttataatttcactcattttgttttgcatttctacttgctctctctgtaatatttttcctgttttcttaatattcatttatttttattctctattaaagattatgtgtagtttcttctaagtttttctgatctttcagtatatcatttttattattctgttttttctgagtctattgatttttctttatattgttttccaacatttcttatttttttctttattcacctttaaatgaggtaggattttggttgatatttgttctactgttagcctacttgtgtgtaaacaaattagcttctcagataagatttcaagacttaagtttttcatgtgtgtttttttttttttgatagaccactgatctatggatatgagatattttctatctccactgttttgttctttaattctctgaactgctgtagtgcattaacaaatgttagtttctggttcacttttctatatccaaattctatactcaacacattaccagagataacttcacaacagaatagaccattctaatggagtcccatctgttcctggcctatgggtttctgaaatataccaccttttctcttgtgcagaaaaatggcatgggtgagaaaaggtctaacataatgttcagctcacagagtactactgtccaaaagacagagagagcaagcatgtggccgggtcttcagattagtagttacttgacttctgagtcaataaacagtaagtaggtaatattaaaatcatagcccaacatttttcaggcagtacctctgtattcccttgaacttaatatgcgtcttgtccaaacctgggtatttattttctccatgaaaatccatatggttcaccattcaacacctgattctgagtctcagctttttcatttattagttgtttgaccttgggcgaagtctcactaaagcttaattttctcatttttaaaatggggaataattgtgagaattgaatgagatgatgtttataaaacttgtggtatatatatatatatatatatatatatatatatatatatatatgtaaatatatataggtatataataagcatcattaaatgttaatggccatcattacaaatagagtcagctttttcaaaattgccattcgattgccagccttcagttttgatagtattgtgagtttccatatttttctttttctcacccccaattgatattccaatcagaaggtaggagaagtcatattataagttaatattgtttcaatccaaaatctctttaattttaacatttctatgttaatttgatttatgggtgttgtcagattgttttatgcagtctgagatcatttgtcttcatgtgaaggagctgaagacattaatattgattatgataatagatactctggctttattagtgtcattattttctattttctttcattttcttttcctcccatttttgtttaattctcatttagtctcctggtgcaattcaatcaatgtatttggtatgaagtatttcaaaaatagaagtcccatttttgcataaattaaaataatgtggaaagtagagacgcatcaaatcaatcattctttctcccctagttgcctggcccagtgatgtactaaaagatgaagtatactccttactagcaaggtttttcctctctttgcccagcagccctaccttacttcccaccaacatgtcctccgagccacaccttccaggatttaaagcactgcttctactttgccagcaccaaagaaaatctgtgtagagaattcttggcttagttgctctctgatagatgctgtatagaatgatataggtcataaatgggagtatgatggaaggggaagcagttatcttgcagccactaaggacctggaagcaagatgtttccttcatcagagcaggttaaattcagctgcgagtattacagttcaagttagtggcttaagcaaaatagaactacatatttcttccatgtaggagtagttcagaggtaggcaattcaagaattcatggttccaggaactcaaaaacttgctcttgtttctcatgcctggctgcttacataaccaaaattgcttcatgattcaaaataactgttgatattctggccactgcatccacgtttcatgtagcaggaaaggtaaagagggaagaacaaggatatcccttccttttaagagaatcttaagaagtgtcatgacaacactgcttcctatatcttataagatcttagtagccacacctggttgtaagaggtgataaggaatgacatttttatcactcagcaatgtgcacagctaaaataccaggattcatttacatcagaataaaggtaaatggaatttgggctaattattgcactgtgacacatctgttctgtgtttggggttgatgaaaatgccccgtatcacatcagtagcagccagtgatggaaataccaagtgtgctctgaacacctgcatggggtttctattgaggaagtgagactcaagcttactgtttcctgctgcactccattggaattaaaattggtgaacagatttctatgattcctgcgctcattgctctttttatcctattagtggacaactaataaacaaagagaatttaaagtcaagtctactgaagtggccaaccgtgttgtctaaaaggctaagaatgtgaatgttttctgacaggtacattacagcagttttcattttaaaatttatacccaagaatatgtgggttactgcttgtctttgatttatttttaatgtggacaatgaaccccaaacatgaagaagatggtttggcgaaatgtttgtaacatatgtcctttgggaagtggcttcataaactggagaatagaacaagaaatctacgcttaaatctcagcttcaagacttcaggatcccaagtggtgatcctggggctactgctaaaattcactgagattcagcttgattatatatgaaaacagagatcaccttcaatctcatcagccacagaacctgtcacactgtgtgcatctctatctccatgcctggggtcatgcctttatgcatgtaaatttaatggtctcctcattctaacttcctataagattgaaacacagaggtctgcggggcctttcccgcttgacccataatgtaatgtaaagacccatcctaacactggccttgtgatgggccctccctgtctcccttcttttacatcattcccaacaaaagcaacccatcatagttattttactaatagttgagtaaaaaatgtaaaattacctctctctctattacttttagaatgtataaaaatcaacagggagtcttcaccacaggctcctaatatgaaagtgtctgtgcaggaaaatccataagctagggtgacttttgagttaaattaaattttatggctcaaaaaatgctttgcttggttttcactaccattataaagcaaagaggataatttcagattcagtttctacaaaggattgctttgggttgatacaggctttatgttagtggcatggaagtatttgcatctgcacattgatatgtagtgaaataggctgtaaaagataagatcaatttcctgttaaaggtaaaaaggccaatgtagccagatacattaagttttttttttttccatttgtcattcaggactgtttgacagttttacattagctgtgaaaggcaccaactggtacactactgtcaagacttagaaagtaggcacacgtacacaaacacgcacacatgctgatgtaaaatataaatataaacagatagaagcctggaccatacatatgagtgccaaaaatgcagttgtcacatgcatacacacctattaaaacatagcaacacaatcttatagcaaagacatgcacacacaggtacaaggacattgaccagatgacacaatgacacagctgggattgacaattacaggtgagcaagcaagatgagggctaatgtccataggagccaagagacctagagaccctcatgtaaacacacagagatgtatgcatatgtgaacacacacacacacacacacacacacacacgcatgaaaagagagacccagagacaaggccagacaagaacacaaagatcaacacttacgtacacataactaaaaggcatgctccaaagtgtgctagagactcagaaacatagaccctcactcattcatgtagccacggcctcctgacctctggttagctatgttttcattttgtactgagacctttaaagtaatttatttgcttcaagactcttcattgactcctccttcgtccgttatatttggtctactttgaagtgtaattcatttcaaattatgtttttaggtttaattcctacaattcaggttctcatgcatcatctggactattacagtggctaccggaaattacctggagtccgtctagccctccccaagtcattcaaaattacccatgtgtggtacatcattactgggtagaagaactgcttctaaaaccaaaaaataacatagagttcattgagtccattttatatgtaaaattttgaaagactagtagtcccattattgcacacacatcaattccaaattgttcttttcaaccttgagtaatttcaaggttgaaattaaccattctcctttatcttttatcctctatccctttacctttatctcccttcatacttacctctttccagccacttaaattttccttgtttcctctttatgcacatgtttttttcgtatctccataattttgcccatcattaagccaatctttcctcattctagcctcctttaataatgctaatatgaatagttgcctggcccttcgctctgacaattacatcctatttcttctgtttgttttaagtttagaaatcccacctgtattcaagatctcattcatttatatttcaagccttaattagtaggctgtatcctcttgtagctataagtagcacagagcttagtactgtacttaatttttctttcagtccttttcaatatatcagttctccccaaatgaaatacagtcttccagaagacaggatctccactttcttcttatccttggcattttccaacccctggctcactctgttatgattttgagcactccacatcctcatactggggcatctagttcctgctgcttaaacttctgactcccaatgctgtatcctcaatcccagttagaattccaaactccagatctctacttcccattttctaatgattgaagcctatttaagccccatggattaatttcaatttacaaattcctgaaacagtacaaccctttcccattatcttactctaaattgatttttccctctcttttttaaaaaaattatggttaattgtcctaccatacatccagtcatccaagttagaatctcaggcattaatttttaccttcttgtttcctttgtttcttccccaacattagggacattaagacctacccttatatggccttgctacccatcactttctgtcatcctctctgagtgctgctctgggccatcccctcaccaacacgaggtcaggcaagaggggatgattggcttcaagctgcttctttgcttgcaattttgcctcctgtgatcagcctctctgatgctaacagaatcatcattctgaaagacaaacctgatcttgtctttcttattgaaaaaaaactttaaaggctcaagagtgccctcaaataaagtccaacctcctttagcagcagcgccttttacagcatcaccttgacctaccatctcagctcaaccatcccttcccttccatttgcatccagactatactttcctctaaatgctgaatacatcatgtctgtgatcattgtttaccaatttccctttatccaaatgcttcatttactgttctacctgggaaactatgctagattttcaagactcagttctgaaggcatccacaatttgctctgggaaaattaaacatttccataacatgttctacaaacttgtaagatagcactcattatgtggttagctgttcacatatctttctccctaattggactgtaagtccttagagaatagatcctatatcttatccatcattgtctgcccagtatgatgtcaggtaatctgtgcatagaattattggctaagttgctcatgccaaaaaatacatactttggtagacggatactatttattgcctacctaatataaattctctagttgatatatatcatttcatttgatttctacagtaactccatgatatagttgcaattgttcctgttttcctagtgagatatctgtggtctagagaaaataagaatttgaccaggttagtctgtttacttttcttttagcccatcatactctttccgtcagcagaattgaaaacgtgttcataagacattacccttgcatccaacttaggaagctctggaataaacaacaggagcaagtttcttcttgtagtagttctcaaagtctttaatacattaatatgaatcttcaagtttgtctatactgcacagtacttcccagatctattggctttagaagccattttatgagattctcatgcaggatatcctttgggaaatgtaaccttatatgaaaatgctgtctttaaataacttctggtgttcttagtctttaggagagaactcctctttcccaactctttctcaggagcatatacacatccctacccaagtgcttcttcagtgatactaatttctgactgaagtgattggcacatcacatcctggaatcctggagacctcctcctgttatatgcctctttttgctctcagcagagaggagagagatagaaatgcatgcttgctgctccctatatgtttctatccatgcccaaacacgtaggctaccctctgtcacagagcacactgaaggggagagaatgcttggattgagctgattgaactccttggttgtctcccatctccagcggtgtttggtttgggttgaatgctgtagagttgcctgtaccttctgcactctacaggagaagctgatttatttttatctctgtctgagaacaacaacatggcatcccctgatccccctggtaatttcctgggctcaatgattgctgttttccttgacctgtttcacagctggtggcactgctactgacctggatttgttttccttagctcaaatgacatagtagcccaggagatgcatggatttgacaacacaaagcctcgatttttaaaacaagacacacacacacacacacacacacaaacacacacacacactcggagggtttttggagtcagagagaacatcagttccacccctagctccaagactccaaatttcaggtctgctgcttgccaattaggacaagttactcaacatcgtagcctaccctttccttacctgcgtaataatgataatattatctacctctccgggttgtgaagaggattaaataagataccttagtgccttgaagatagcagcagtcacttaatgtttgctatgtttatattactatcatttttcaatttagacttttattgtttccctttattacatttactgtatattttctttctcatgaactacctatctaggcctgattgtgtgttttttaatctaaggagaaactaaaagaaaaatctattgatcctttctacaaagggtttgtgattatctgaggaaattaatcataaacataggaaaaggttacctatgatatatgcaatattttaattatttttaaaagaaaaggttactttgtagataaactttttagataaatccattaacactcaagtttaatgtttacataataactgagtacaaagaccaagatttgaaaagaagttttttatgtgcgtattacttagagcataatccaactaaaccagtggaactaaaaactttcaagcctagaaagtttagattcttagaataattttttttgacatggtttttctttgtcatgaaggctagagtacactggagaaatcacagctcgctgccacttctacctcttgggcctatgtgatcctcccacctcagcctcacgggtagctgggaccacaggcgtgcgccaccacatccagctaatattttctatttttttgtagagacagaatcttgttattaaacatgaacaaatgggataaactaaaagaaagattaattcagtctaccaagactaaattagaaagaaattaaaaatcggaacagacctataaccagtaaggagaagaaaaaatattgccctggttgatctcaaactcctggcctcaagcagtcctcctgcctcagcctccaaaagtgctgggattataggtgtgaggcactgtgcccagcccatgtaaattatcgaagagcccaaagagcttttgcttatgtgggtcttacccatcaatattaatgatagtaaaattaatatgagaagacttttaaaatattttattggttaatgtagaaaataaaaataaaaccaatgtattataaatattctaatgaaaaataaattattttccaaaacgccctcacacataaaaatgagaaaaagggatgatgtacatgcatatgtttcattgtgattaaaaatgcataaaataaaatttccccttttaacaaaattataagtataaaagacagtattaactataagcacgatgaggtacagcagatctctagaagtttttcattttatgtgactaatactttatatctattgaaaagcaactgctcggttagccctttgcccaggcctgggaaaaatcattctactttctgcttctatgagtttgactattttagatactttatataagtggaatcgagcagtatttgcccttctgtgactgacttatttcacttagcataatatcctgaagatccatccatgttgtagcatttgacagaattttcttctttttatggctaaatagtattttattgtatgtatttacaaaatgctgtttacctatcaaaggtcatttaggttttttatatctcttggttatagtgagtaatgctgcaatgaatatgggagtgcagatatctctctttgagatcctaatttcagttatgttagataaatacccaaaagtaggatggctcaatcatattatagttctatttttaaattcttaaagaagacttcatagtgttttccatagcatctgcaccattttaggtattccaaccagcagttcacaggggttacagtttttccacatttttgtcaacacttgttattttatgtttttctttatctttgtaaataaatataatggccataccaacaggtatgaagtgatatctcattataattttgattttcatttttctgatgatcaatgatattgaaaatcttttcatatacctattggcatttgtatgttttctttgaagaaatgtttattcaggccctttgctcatttcaaatcagataattggagctttttttgctactgaactataggagtttttttaaaaattatattttaagtgttaaccctttatcagatatatggttggaaatattttctcctattgtgtaggttaccttttcactctgttaattgtttcttttgctgtgcagaagctttttagtttgatttagtctcacttatctattttttcttttgttgtctattctttcgctgtcatatcaaaaaatgcatttccaagaataatgtcatgaagcttttcccttgtggtttattttaggagttttacagtttcaggtcttacatgtaagtctttaccacattttgagttgctttttatatatgctgcaatatatggattccatttcattgttttgcatatggatttccagttttctgaacatcatttgtttaagaggctatcttttctccattatgttcttggcatccttgtcaatgattatttgacgataaatgcattggtttatttctgggctgtgttctctgttcccttgactatatgtttgtcttatgccagtaccatatttttttattactgtagctttgtaatatgttttgaaattacagagtatgaggactctgacattcctcttctttttcaagagtgttttaactatttggggtcctttgtggttgcatattaatcttttcttttatttctgtaaagattgccttggggttttggaaaggactgcattgaatctgtagattgctttgataccatagacattttaataatatagtattaagtcttccagtcaagaaaagtagaatgtatttccatttatttgtgtttttcaaaatttctttcagtaacattttgtagttttcagcatataagtctttcttctccttgcttaactttattcctaagtgttttattatttttaatgctattgtaaatgtaattatttttttaattttcttttcagattgttcattgttagtgtataaacacaactgatttttgcatgttgattttatatactacaacttttgttgaatttatttattagttctgacaggtttttgtgtgtgtgtgtgtgaaatccttaggagtttcttcatataagatcatgtcatctgtgagtagagattattttatttcttttcatttttgattattttatttctttttcttgttaaattgctcacactagaacttcagtacaatattgaatagaagtggcatgagtgacatccttgcctcgttcctgaccttaggggaaaagcattcaggttttaactgttgaatatgttgctagtggtgagcttattggatatggcctttattatgtttggtaatttccttctattcctagtttgttgagtgattttattatgacagaacattaaattttttcaaattctttttctgtatatcttgagatgatcatgtgatttttatcctttattctgttaatgtggtgtatcaccttgattaatttttgtctgttgaactatcctttcatcatagggataaattccacttggtaaaaaagtatataatcctcttagtgcgctgttgaatttgatttgttaatattttgttgagatttttacatgcatattcatcaggaatattgacttgtagattccttttcttgcagtgtctttttctgcctttggcttcagggtaatgctagccttatacatgagtttggagggggcccctcaaccacttctcaattatttggaagatttgagaagaactgttgttaattcctctttaagtgtttagtagaatttaccagtgaagccattggtcctgagtttttccttgttggatagttttttgttgttgtttttgtttgttatgtttggtgttttaactgattcagtcaccttacttgttataggtctgttctgatttttcatttctttctaatttagtcttggtagactgaatttatctgtttcttttagtttatcccatttgttggtgtttaattactcatagtaatttattataaccctttatatttctgtggcatcaatgtctcctctttcatttctaattctcttcatttaactattttctctcttttcttagtttagataaatgtttatcaagtttatctatcttttcagaaaacagctattagttttggttttttattgtttctattctctattttatttatttttgttctaaccttcattattttctcctttctggtagctttggatccagtttggtcttttcctagtttatcaagttgtagaattaggttgattatttgagatctttctcctttttaagatctttcttcttttttaatgtcagtgttcattgcaatatacttctctcttactactgcttttgctgcatgccataaaattgggtatgctgtgacttattttcatttgtctcaagatatttctaatttcccatttgattactttttaattcagtggttgttccagagtgtattgtttaattttcaactattagtgaactttctaggttcattttggtatttatttctaatttcattccactgtagttagaaaacatacttttgataagttagtcctcttaaatttgttaggacaagtcttgtgacctaacatgtaatctatcctgtagaatgtactgtgtatacctgagaagaaagtttattctgcttttactgactggaatgatccatatttgtttataaggcccatttgttttatattgtgcaagttctctttccttattgatcttctgtctgaatgttctggccattattgaaagtgggtattgaaaggttctactgttattgtgttgctgtgtatttctcccttcagttctgtcaatgtttgcttcatatgtttagatgctctgatattgtatacatatgtatttataagtgttatatcatcttggtgaattgacctttttatcattatataatatccttgctcttgtgacagtttttgacttaaaatgtattttgtctggtataagtatggccatcctgctctatttttttttctttttgaatggaacatgtttttttttccatactttcagtttcaacaaatttgtccttaaatctgtatagtcttttgtaggcagcagataattgtatctttttaatctactctgccactctatgtcttctgattgaggagtttaatgcattcacattaaaggagttcttgaaaaggaaggacttctttttgccattttgttgactgttttctttcgtttttgtagtgcttctggtcctctttgtctcttttgatatcttcctttatgtttcattgattttttatagtgacatgcattgttttctttctcatttatcttctataaatattatctttagcattaccatggggcttacataatcatattatagctttaatagtctattttaagctgataacaacttaacttcaatcacatacaaaaactcttcactttaacctctgtcctcctctaccctttatgttactgataccacaaattacatctttttatgttgtgtatcaaatagtatatttttatagttattgctatttttatgcttttgtctttcaacttctaaaccagaattaaaattgatttatgcaccatgcttacagtattatagtattgtatatttttaatatatttatctttaccagtgaactttatattttatatgttttcagtttatcatttagcatctttcagtttcaatttttagtactccattagcatttttttgtagggcaggtctagtggagtggaactccctcagttttgttcatctgagaaagtacataccttcattttttaaggagagttttgccaggtataatattcttgtttggcattttttaagctctatgaatatatcatccaacttcatttttgactgcaaggtttctgctgagaaatccactgatagtgttatgagagttttcttctacataatgattggatttctgcttgctgctttcaaaattctctttgtctttgaattttgacagttagattatatgtgtcagtgtggacttccttgggttcatcttattggggattcatttgccttcttgaatctgagtgcatttttccttctccagatttgtgatgtttttgttgtttctgtccagtaattttttaaataaacttttttttcttttctctctatctctttcctctctctgttctcccctgggactcccataattcatgtagtggccagcttgataactttccataagtcacttgggctttcttcattctgtttttcattcttttttcctttttgctcctctgactgtataatttcaaatgacctttctttgggttcgttaactcatatatctccttagtcaagtcagctgttgaaccattctagtgaatttttcagttcagttattgcattcttcaggtgcaaactttgttttgctttttaaactatatcttctatatttttgtctgcggaccacatactgagaactgctggtctcagctgctgtaacaaatatacccaagaatacagaagatcaaacaagatatttaataaaataatatttgctcatgtaattgtctaatgcagtggttctcaactaggggaaattttgcccctcagaggtatttggcaatgtctagagacatttttggttgccatgactggggagagagaagttactggcatccagggatgcaactaaacatcttaaatatacaaaacaatctcccagaacaaagaattatctaacctcaaatgacaagttgaggtacagaaactctggcttaaagatgggagttgaggtgaggaagatggttatctcctccgcaagatcatctaagggctgaggttccttcttttctagttgtcgtgttgtttcccaaggagttgcccttgtctacagagtaagtcctgcctcactgggataacatctacttttttgcaagaggaatagaattacatgagcaattaggtaagcaaatatccttttatcttgtttgaccttctgtattcttgggtatatttgttatagaagctgagaccagtggttttcaaggtgtggtctgcagagaaccttataggaaatatctggtgtcaaaactatttttataataatgctaagatattatttacacttttcactgtcttgacatttgcaccgatagtataaaatcaatgtctgataaaactgctggctgcttagtacaaatcagctgcttagttgagaacaataaatggactcaagaaaataacgtggaagttgtacacatccttccatctacttacattccattggtaagaacttgtccaaatggtgaggctaagaccttgacatggaggaaggagtccatttaaaagggaaattcagggaatggtttctggggaaacactggcaatatctgccctgatagagaaatgctttaaagcttttgaaggcatgctcaaagaagtcagaggccttttatcatagaacaacttgaaatttttatttatgtataataatactttctatatgtaaaagaaacacatttcttgttatattttgcaaacccatgacttacaatgaatttgccattcactttctggagacaattaattcctcggggatataataaatattcttgcccaaacgaagaatgtgttactttggaagaggtcattagcttctacaaaatgtaagtaagctgatatcttactggtttatgggacttatctttgggctttattaaaatcctgcatttttaacttgaaaaagaaaaggaagacagacattgacttactgtcaaaatcaacaaggtctggatgaaggccccttgaaagtctcatccctgtgagccggtaaacatttatatctaatttgaaatgagatgcttaattacataatttcattccaattaagctgctaattaattgacagggcacctttgagagctttacacagtgcaagtaaaaggcaactacatcttgagtctattacctatgaccgtttgggagagatcagtaaataactatttaagaggctggagacagagtttgcaagaagagaaaacaagaggctagccctgggagatccagactcaggaccagtcctggccaagactcttttgagcttttttttcagtctatttcttgagtgagtaatgaaaggaaacaaaagaaaaaaaattctcttactgagcatttactacatgtatgtgctaggaagctgcaaatgaaaaatgtaagatgctagactatctgcccagttgttgttttaagtaacactgttgtttgggcattaagtaagtagttttgctatctccctggtatttaacttagccaggtctttcttcttgtttttccatctctgagctttattctggggtcaaattaaagcttattttgtgtacagatcatcaatgtctatttaatctccccagagggtagtaatgcttttgttgatagtgaaaacaattccaaattgacatcagtttttcaaaataaaatggattattttactacttgcatactgcagcttattagagtagaaacatataacaataaacatctattcatacacacatgcatgatacttcacttgcctgcactggagaagaaattattggaatgtatctttttcatccagtttaatgcagaagcagaaacctagggtggacaagctggttgtctcattactgaacattactgttgactcaagagtctttccacattacttcagaaatgctccaggactgcattatcacatctttacatctcatcattggttttattctaaaaaattaatgaaacaagttcgagttaggtttatcattcaatctaaagagtttcgtgtagtatatcacccactattatcacctagtccataactggcatcatgcatctttttaaaaatattatttgaataggtacgtttcctcacagatatatcaactattgtgcatatctctagttctgattctagttaatcaatatcagcagaaagcttatcatttcatgtctaagtgtctgtgtgggcatgaaattgttaggaattgttttagtgaataactgattcaaaaattcattgcttaaaaacaagatttttttttacagaagcattcagaactccaaagagattataactcacagagaattattttaaaaagcagataatatcttattccttttttccacacatctccacataccaacttaaatcttcaccagtaaagaggaatccaggggaaatcataagagaagcatctttgctatcctcgctgaagtgagagacagtgaacttttcctttgctcatactcagtgcctagaatcacctaggaaagccccttcccatgggaactcagcagccatgagcaagctgcccttacaggctccatcctggtcactgacaggttactccggctgtgaccactgaggtccacttccactaatgcctcagaattttaacctgagcctgacaaatttgcagggtatgtgggcacacattactgtatattgcagctggaatgcaaacaaagtggaccttaatggcaattaaatcccaacccctcattgtacagatgaggacctttaaatgcagataggtgacaagcaaatatttggttgtggtcaatgttaatgttgaattgattacttaatcaaaaatcacgagattgatccatatttagacaaacatctatgggcttacacaccgatggaatttacaccttatgtatctgtatacattatagactttctggacattcaaatccctttcgtagaagattctgaggctttgagatactggactctggtctggtaagacttgtttctctccacatggtactgccagctgtaacacagggaatcccacttaggagcatatgcagggaaaatgatcatcactttgccaagccctgttttatccttacttcctggcatcaaagctatcttacctgatcttactttccactagaatagagcccaatctaggccatcacccaaaaactggaggagactttttggtagatacttgtaattgagtttattttcatatatttagtttaatgcaaaatataaattaatgaataaaataaaatattcagaatgtctttttttaagccaagatgataagcattccttagaatgtatgtgatggagtaatatgacacatgtggactagaatattactgaggccgccaacagagatggcaacactaacaaaagtatggcttaacattcctaaagctttgatttgttgccttcttgagaggaggtagttttaattcgcttcttatatgccattaaggcatcgttgcctctggatatttatgtttacttatcagtttatgatagctattgatttttaacagttattttaaatctcttgaagaaacacatgcaaagatattttcaaaattcatagtttgctgttaatcacttatgtcctgaaactattgctaagcaaaagttttcattatttgttctttgagggagtataaatttaatttagagtgagaaggataaaacccaggattcgtcaccatcatttcaaaccagatactgtgattttttttgcggggaagaggttgagagaggcttcctggtttgctcctttgttgattttcttacatatttgacagtgtcaacattgaggctcaccagatcactgccaaagcccattgtgaagagtggctgggccagtgttttaattttggtatatattgaaaggatcgtattctataattgactatgttttacttagatggcattactgaatgtacattttcagaatttattttgaagactgacatcatagaagaagctcatctagaatactatgttcaagcctttgaaatactcaaagaactctatagattcagtgtaatccctatcaaaataccaatgacagtcttcacagaaatagaaaaaaaaaaacgtaaaatgtatatggaaccacaaaagagaatagctaaagctatcctaaggaaaacaaaactgaaggaatcatatttcctgacttcaaattatactacagaggtttagtaaccaaaacagcatggtactggcatacaaaaagacacagacatcaaaggaacagaatagagagcccagaaacaaatacacacacctacagtatactcatttttaacaaaggtaccaagaacatacactgtagaaaagacagtcacttcaataagtggtgctgggcaaattggatatatgcagaagaaggaaactagacccctatctatcaccatatacaaacatcaaatcaaaatggattaaaaagttaaacctaagacctcaaactatgaaagtactacaagaaagcattgcggaaaatatctaggacattggtctaggcaaagattttttgagcagtaccccagcataagcaaccaaagcaaatggacaaatgagatcacaaattgaaaagctactgcatagcaaaggatacagtcaacaaagtggagagataacccacagaacgggagaaaatagttgcaaactactcatctgacaaggaatcgataaccagaatatataaggagctcaaacaactctataggaaaaaatatctaataatctggtcaaaaaatgggcaaaagatttgaataaacatctctcaaaaaaagacctacaaatggcaaacacctatatgaaaaggtgctcaacatcattgatcatcaaagaagtgcacattaaaactacaatgagatagaaggtggtgtaccagaggctgggaagggtagcgggaggctatgggagaggtgagggtggttaatgggtaccaaagcaaatagatagaatgagtaagagctacaatttgatagcacaatagggtgactatagtcaataattactttattgcaaattttaaaataactgaaaaatgcaattggattttttgtagctcaagaataaaattaaagaacatggagaagggcaaaaaaaactaaaaacaaaaattaaaaattttaaaaagccatgaaataattaagtaaactggatattcacataatgaaatggctacttttgaaaacggtttaattttatataaatataaaaggtagcctcccacttcccttcccagcctctggtaactctccttttactctctgtgtccttgagttctgttttgatttttaaatcccacaaacaaatgagaatatgccatgcttgtctttctgtgcctgaatagttttgaataactctatgagaaaataaatcagagattttaccaaaataatagagttaaacataagatttttcaaaattttgtctcttttctagtttccttaataaatgtgtgtgttgttatatatattaagaaattttaggccaggcacagtgactcacacctgtaatcccagcactttgggaggccaaggcaggcagatcgcttgagcccaggagtgcaaaccagcctggccaacatgaggaaaccttgtctctactaaacataaaaaaattgggctgggcgtgatggctcacacctgtaatcccagcactttgggaggccaatgcgggcagatcacgaggttaggagttcgagaccagtctggccagcgtggtaaagccccgtctctactaaaatacaaaaaattagccaggtgtggcggcatgctcttgtaatcccagctacttgggaggcttaggtaggagaatcgcttgaacctgggaggtggaggttgcagtgagccgagatcgcaccactgcactccagcctgggtgacagagcaagacttttctccataaaaaataaataaataaataaattagccagatgtggtggcgagcacctgtaatcccagcttcttgggaggctgaggtagtagaatcacttgaacctgggaggtggaggttgcagtgagctgagatggcatcactcaactccagcctggacaacagagcgagaccccgcctgaaaataaaaaaacaaacaaacaaaaaaaacagagaaattttgaacaagatatagacgattccaaaaggagcaagcaatatggcatgcagttcagaacggggtcttccaaatacaggccctgacttggtcattgcaggccatgtgtctttgacaaaacacctttgcccaattacttttatagtgaaaaggggacaataatagtgcctactttctaaagttgctgagagggttgcattagaatgtcttcaaaaagcttatcacattgcctgtcacaaagtgatattaatgattatgttcataataccattaaaaaatttattactttctaagcaggaaaaaaaaaattcaaatttaggacagtcccataataagaattaatttattttaacaaataaagttatggcttttgttttaaattgaaatagataatttaagtactttctcttaattattttataaaatgtatggtgttttaacatatgcaaagttgatatcaattctattttcttaatctctcaaagttgccacattgctatagaaataactgtaaaaacatgtgatttttccttccacttgtatctgaacagcatttactcatttaatccaaaagctgaagagatgaaaaattgggagatagtggtttcactgttcacagacaagctttcccactggctctgtgacctcaaacaaattggtttactcctctgtgcctctgggccagtgaggaagctttcagctgccaactagggaagaaactcctgagaatgccttcagcaagagcgcagccaaggcagagtagctccagggctggttaattcagttactcaaggacagtatctaagatctaaggtttcctcccaactgtatttcctgcattcctccgtatctgttttcttctcatttttcccctcatgcacacatgttggcccaggcattacccacagatataactctagtagagacaggaatgaatatgtcttttctgttgtatgcttcgtaagactgagaatctccttcctacaactccccacctcaggatctccctgacgtggcactattcagaactgggtcacatgtcacccccagtcactgccaagaatagtgagattgctttgcttggttaaagcaggatgagcttgttagagtggttagattaatcaggatttgtctccgaggtggagaaggtttcttctgtctaggttggacagtttagcaacatttactttaggattgaattgacttgagtaacaatgcacaacatctgctgaatccttaatttttttagtctataaaatagggcaaagttcagttttatctaggtcacagaatttttaaaggataaaatgatataatgtcagctcaggcagttcaagcaagcctatgactctcaaatgaacagtggtgctttcatgataagtctaagaatccttggccaattatgtataaatgcaaccctagtctctccttcatctcctttcccactgttcagccatggctttcagagttcatcatttatttctacattgacagctaccccaatccccattccaaattcacatgatgataaaatgtacaaactagatgacttccaatcttcttattttcttaacaagtttgcaggagccattaataatgtagagcaaaatgcagtctcaggtgtgtataccaccaagatgtaacttacaaaggtaactctacaagagggaacttcattccatgttgtaaaactaccatgtattccttctgtgtaagtgggcacagggagaactcaaagtgtttatggcttagcatgcatgctttcttaccaaacactgttcttgtcccttgttgtggccattctgagttcttttatgcaaatgtgacccactaagaaggattgatttgtgctcaggcctcagccaatgcccattttcttatgccctgggatttgtttcctagctgcctctggccctgcggttgagggttcttgccagttcgattctaatacatgaacactttcctttcattctctctttctgatttccctttgcatttatctgctcccatcaatgcaaaatactgaatggttcaaattgattttccttctcaaaacaggaaaggtctgtttttcaaacttccgtacttcctaaggaaatgtctctgatcaatatgtgtaagaattaaggggaaacgccagactcccccttctgattgtcagtaactcagtgcaacccgtttacctcttaggattcttcccagcagaaaacgctaacaattgcaattatcaccattatgcagtatgttcaattgtacaatcaatgtaattgccaaatggaaattatacaataaatataattgctgctttactcctgtgcagtatttcagtggcacttcacatttattttgtcttttaattagtaacaggtataattgcagcactacactcagagctgaagctgaataatttgtgggagtgggcatagggtacagatattgaaagagggctgctgtggttcattctttgctggaattatctaaagatatccacctattgtctaaaacccacctaacagccctaaattgagctgacctgtggacacatttggtgtaaactccaggtaaaaaaattccctgcagttcctgaggcacatgactttgccatccctgctcttgacttcctgcatcccattgtccctattatttgtctatctagatgaatgtattaattcattgatttaataagcatttattgagcactgattatttacctgcaggagatatgtagtgaacaagagaggcatgaagcttaaaatctaggggaaaaatgcagagactacataaagagcgaatcaagtggtaggaaatgtaaggtgattagtgctaaaacatgctaagaacaaaaagttattatgacgtcataatatcttttgatttgatggtcagggagaacaactttccaagacatgatattcagcttgagatgataaaatgaggtaggttgttcaagtgggggtggaagaaggaagaaagtgagagagagagagagagagagagagtttgtgaggtgtgctggaagaggtagagagagaagagcttagatttagagggtttccacattataataaagaattagatatttattataagtgcaatgggaaaccaatggagagtttggtgcacgacagtgacataacttgatttctattttcttttactttttagacggagtctcactttgttacccaggctggagtgcagtggcatgatcttggctcactgcaacctctgtctcctgggttcaagcgattctcctccctcagcctcctgaagagttgggattacaggtgtgtgccaccatgcccggctaatttgggtatttttagtagagacagggttttgccatgttggccaagctggtcttgaactcctgacctcaagtaatccccctgcctcgacctcccaaagtgctgggattacagaagtgagctacaatgccagaccttgatttccattttataaaaagtctattctgactgttgtataaaaactgattgtagaggaacaagaaatgaaagaaagcagatacagagaaaattgtcagtgtctgggtagaagtttctggttgctagacctaggatagttctggtggagatgaaaagaagtggagtgattagaagaacatttggaagtggattgccattgctggttgacagaattgatgtgaatggtgagatcaagaatgaaattccgaatggtgctaggcttttggcttggaagttactggaagtctttaaaaaagaacagtcttattagtaagaaaacaaagcttgttccatttgaaatgccattagacatccaggtaaactattggataaataccctaaggggagtagtcattaccgtagatataaatgttgaggcttaacggcattgacactgaataaccctggaccagggtgagataaacatcaggaacagaaaacagaagagatctcaggattgagttgtgagtttttgcaacatttagaggttccacagcgaggaagaattggcaaagaaaattgagtaatagctgctagtcaggttgaaggaaaactaggaaccactccagccaagagaacctttaccaagaagagaaaccttaacgatgtgaaattttactgagagtaagaagaaagcaaagctgtggtctttccatttggtaatgtggaggctgccactgaccttgtcagaacagctttagtggagtttttaggctacatatatgatatgtgtgggttgaaaaaaaaatgaggtgaggaaatgaagacagcatgcacagatgatttttggagtgctgtgacaaagaacaagaagcccagttgtaggtggaggggcacatgggtcagagaggctgttggatatttttgtatgcaagtaagtgtgaaaagtgagaaatggatgctgcaaggtgggaggtggagtgctttgagaacaaagtccttgagtagatgagaagtggaatccagagtataagcaaagaggctgcctcagacaggaacagaggcttgtcttcctctgtaatgggagagaaggcgagagtgtaggcatggattcgggaaggtcagtatgtgacagtaggaggactgctgctgcctccccgtagttcgtgatctagaggagagagactcattgtacacagctcactacatgagtcagacagtggtctgagcagacagcaacaactgctgtgagagggcaccggtgggaggactctgcctaccaaagtttgacagtgcaggtggcatctgactttggcgttgaataatagatattattatcctgttatttgacttagacatcaacaggtataagggcatttcctctagaaggccgcttgcgaaagacctcgtatcaagaaagactaaggaagacatataggttgatctctttttccacagaaccctctcaggcatcagtgctttttcaaagccctgttctcctttgaaaacttcctctctccctttccttggctattttctaattatcttgcaaggctaagttgaagtgttcctcttccagaaaaccttcccagggcctacccccaaaccccttatcaatttgagttagattccttcctagatgtaggtggagcaaaaagatagtggcctctattttttggatgtgttggcatgagtgttggctttatccatctggtagaacaagaagcgtccatggtggtagccactcaagagctcaggcaaaatggtattctgagccccagagggctagattgaaggctgccaaaagagaacagtgtttgcaatcttggaaaaaatccttgttcatgtttccatggacacgtgcagttgagtccagctttgcacttcactttggtcaaagagtattttgatgtgtatcatgaaataaacatacaaataataaaaatcataaacaaaactctcagcatatgggtcagaaatcctactcagtttgtcatttatggtgggactcaagtactatcagcaccaactccacagcccagggatgaactttgttgtggtgtctgataggaaagttcaatcgaacaagctccccccaccatatctctataaaacagtcttatgctatgctatggaaaaggtttcagttatttgtctgaatatggtgggaggataatatcacctgcaccacagatacccatgccccaacccccagaacatgtgaatatgttatttgacatggcaagagggaattaagtttgtggatggaattaaggttgctaatcagttgacattgaaatggggagattatcctgcactacctgggtaaaattaatgtaattacaagggctcgtataagtaaaccagagaggcaagaaagtcagtgtcagagggacacagcatgaaaaggactcgactggccatttctggctctgaagacaaaaggtggctgcagatgaaggaatgtaggcaagaaaaggcaagaaaatagatacatcccctgcagtctccaaacggagcacagctctgctgatattttgattttagtccaatgagactagtttcagatgtctgacctgcaggactgcttttttgtgtgtgctgttttaagccataaattttgtgaacatttgttgcagcagcaatagtaaactaatatccagtgtgatgtacctctgtgcctgaatctgagactccatctaaaacccgtgcacagtcacagtgtataaatgggtgacaagatgaaaacatggcgggattcataagcaaaatgctgtgcctcagaacagtgccctttcagtaaggggatactaaatagatgacagtttttaaacagaacccctcagaacttcagtttcctcagcctgacatttggggtagtaacacatttctacattagaaggagatgtaagtaagataatgtgctatgaatggttttgtaaacatttataaatttccttgtaagatctctgcgatgattctaatactcttttgaagcactagaaagtacactggcctgagaaatgcaagagctgggttcaggtctcactttcaatgcctgtggcattcattacacaacccaatttatctttctgaagactccatttgctcatcactaaaatatggataaaaagatttagtcaactatgctaaaaggtaataataaaagtaaatgcacttttatttatttccactgtgtgtgcaaataattattaataaaatatgtcaccatacttacttctcattcttggtcaataaaacaatatccacaattccagctctcactgtacaaggtctctacatgagctacagtgagtgagtgagtgagtgataaggaagagggtgaatggcaggtgcaggaatgcccatataattggtgagctctttctccagccactgtgtccaggatctatgctcagatcttaagacaatccctgtagtcctcggtagaaagcctcttaggaatcactctttcatatttagatttattcctgggaaacttaaagctacctcaaacccagttcttttgctcagagttctcaacacaattctctgagttgtctagtgagtagaaatagaagccagaggttcatggaagtccataaacgcagtgtacatgttaagcgtttaagaaaatgctgtccgtcttgaaagcagatcaggaatctaagagtcagggtcattctctgtgactgcagtcaagatgagagcaaccaactggccctcacaggaagttttgggaggcagaaacttcattgattcatctaccttcagaatttcacatagcaccaggcacatagcaagtgaatgaatgttttatttaaaggaaatctgctcttttgaacaatataagtcttatttttttcaaagagatgtgtgttatcaaggaacttgatatgcccagaggttaaacttagttttctgactgccatttctatagtacaaaggctccagggtgctttctgtatggattagatgttaggcacacaactctcccaaacaaaactaaaaattgttccacaaatgtggaaagtatagaaaattaagtaatatatgcaaagtgatgagaatggtacacagaaaagagtgcaatgtgtttgtattatgctatgtgatctggcataggttcaattatattttcattgataattttcctataaatccatgctttggaaaatgacctgtctttgttttccctaaaggtaatgttatgcctgtatttgtgtatcttatcctagataaacaacaccagatgttgaaagagcataggaaggaccatgtgatatttatcttaagataatactagaagaagtgaggctattctagaacttaattgattcctgataaatctgagaaacaaaaattttgagtccttaagctattcatgatttccatttaagaaaaatttgtctctattttcttatttcccaaatatgttaattattgtaaaccaaatagaagcaataactgaattcttcattaataaagctgctttgtttaaatggctgtcgacatcttatattattatatagaatattatggtgacatagtcttatcaaaaaagagaacatttaatcacaaatttgtaaagcaactggattttgaaaatccatgaacattttgtacacaatagttgatgttaccttatgaaaaataaaaccttacatggttgttccattaaaagcccctgcttctaatacatagctattattttattttcattaaaaaatatggggacggaaacactgaaaatatcacttgaagataggcacagcctgtctggtttcttttatggtttttcagattccaaacggaagaaaaagatatataaacactacttccttgggtggcagatcaaataaaggacagttttgtttttgttttgttttgttttgttattcttgcaaaagctcttagtgaggtagaacaaaataaaagatggtttaaaacaagagaatcacatttatattgcttggctgtcttatttgtaggaaagaagataaattctttacagataggtaacagcactacccggtgctgactatttgagtgggatatatttccagttcattaaaataagcaaaggtgatttaaaaaccttcaacttcttgtacagtcacacttatcaacctaggttaattgggagaaaggccatatttctctctgaggtttaaaaaagtgttgtttcattcatttattcgctcactcattcattcaccccctcttcaaattcataaaacatcagttcgtgcaaggctatgattctaactaacgtactgaaaataacttaaggggccgggcacggtggctcacgcctgtaatcccagcacactgggaggtcagggtgggcagatcatgaggtcagaagttcgagaccagcctgaccaacatggtgaaaccccgtctctactaaaaatacaaaaattagccaggtgtggtggcacacatctgtaatcccagctactcaagaggttgaggcaggagaatcgcttgaacccgggaggcggaggttgcagtgagccaagatcacgccactgcactccagcctgggcaacagaacacgactccatctaaaaaaaaaaaaaaagtacaaaaattttctgggcgtggttgcatgcacctgtaatcccagctacacaggaggctgaggcaggagaattgttggaacctgggaggcagaggttgcagtgagctgagaccttgctacccctgcactccagcttgggtgacagagtgagactctgtccggaaaaaaaaaaaaaagaaaagaaaaaaaaataactcaagtaacaataactaagagtatatactaattatttaattcattaatcaatttgttcatttttattgcctattatgatgtataattccaagtttctcaaacctaaaccaaaaatatgaagcaaatttgtagtgcaacctggaagcttctctccctgcactctaattctgatatgttggtgcagctctgcttagttcaaacatgttctgggagctgaggtatttaatatagttcatgctttaaataccagataggttgggaaacactttcatttgaaaatttatgtgaatatataaactgatctgttaatacaccaatttatttatgcaaatgtgtatttgtggcccttaaagtcaattttcttaaatagaaatagttttaggcagtttatgtaaaacgttgattttctcatccatttgcacttacattaacttctgtatggtgacacaataaagatagctatttgttacttggtaggttagcacctgtcatcaatatttggagcactgcctataaaaccagacttagataagggtcaaggaagctatctacacttggtgcctacaatattaagtttttctgtatcaatctaatttccagattacatttctttttttttcatacagtttaacgtctgatgcccgctatctgtgttattgagagtgtgcatgtgtgtgtgtgtgcgtgtgtgtgtgtgtgtgtgtgtgtgtgtgttgccaggaagtagaataaaggactatattcgtatcagagcacttaggacatcactgtggagattggtttattccttcagcctcagtatccttatccgaaaaatgtacataattacacatagggttgtcataagggttaaagtcactctttttcaacaaatttttattgagcacctccttaatatcagacactattctaagtactggaaatacaacagtgaacaaaacaaaatattgcataaatgacaatgtgcattcttagcattgtgctaataaattaatcttcaattattagtgcaattggtgttgttgttgaggtagtggttggtagcagtagtagtagcagcagcagtggttcagtaatacttactgactcctgtaccagactggatatttcctgacacactgatatgaactcctaataaatagtgcctactaaatacctggcatggagaagagatgcacatatttgttgaattgaagcattgactatatgttttcatgcatatttttgtaattaacaaatgaaagaaaggcagaaagaggactaggatgaggaccatgtgatggaattactcagcctgcttatttctcacaaggaatgaggggatagggatataggaggagattggtggcatcgatgtctaatattatttggcaaataaatcaatgatgggttctaactctatctttacaacaaacctatgacgcaagaggaagagagaaagtaagtcgcatgcccgaagtcaagcagctagtactgcaatgaattcagaaaagaatcaggcctgttactctccgaaggcctttctctttctttatcctctgaagtaaagctgaggactgctttttgggtgaactaacacttaggagttgagagtttcagaaaaagggcttgcaatgtcatgtcctattgccactgaagaagaaaaaggcacaccaacttcacactcagctactccaagttcagtttcaattaaacataaagagacagctgggccgggcacgttggctcacacctgtaatcccagcactttgggaggccgaggtgggcggatcacgaggtcaggagttagagaccagcctggccaacatggtgaaaccccatctctactaaaaatacaaaaaattagccaggtgtggtgacaggcgcctgttcttccagctacttgggaggctgaggcaggagaaatcacttgaacccaggaagtggaggttgcggtgagccaagatcgcaccagcgcactccagcctggtgacagagtgagactctgtctcaaaaaaaaaaaaaaaaaaaaagacagctgtggtttcaggctggaaccactggagccagaggggcctctagaaaggcctggactccatggccagagggaaggagtttcacaaacaggattttgatagcactttagccaacagttctttggtgttctaatactgcttgagaatggttttgatgtctcataaggggttacatagtgagttatctgaaatcatttctgtctcaaactgtccagtctcccttacggtgctttagtcaactcttcgtcttctcagtcttcatgttaaaaggaaaaatcttagtgaaatctactacaggagaccagctaatttcttgaacaatagtgaccattttggtgagaggcctttaatagcggtattgagaaggcaaaccttcaattagaactgaaaaagttgtctttttttttagcaggaaactggtaaagggggtatctttgcacaaaagcagtcatatcagcaggagacattgtaaaattaaccagtcaagatacctttcaaaggtaactattaagaaagggaaaccatgtaacacccacctttcagcaattttttctgtaacattttattaagtatcttttcttaaacaaatgcaaagtgtattttacttcacataaatttgacattcatttcatcgttcattttgtgtctagtatgtaagaaattatattcaattctgttgaggatttagagaagagagagacacagcttatgccccacaggtacataaagtttagatacgaagacaattgatatacacccatcaaaatagtagtaatcaaaggaaaggaagaggaagaaacaggtatttcttgaagacctactgagtacctgccagatacttattattgttttcattttaaacaggaaacagaagtttagatgggttgtgacatttgcccacgttcacacaggtatagatttagagataagactcaaattcaattctgtctcctcccagagccagcactgtgttcactaagccccctgactcacacacatgacacagggatctggagatctctgctgaggtgttgaagctttgaggaagagatagcattttatacatgcattggagatcaagttgtaacaaatggaattttagtacatagttattccagatcatcatcttatggattgagggggtaaatgaaggagcatgtgagtcttccttggtttttccctgaagtatttgggaaactgaaggcaaaaaaaatccaaagtccaaagcgtgcgtaagagtcgttgccacttttgagagaataagtctgtagatacctttttacctccttcggtcaatgaataagtgctactgagtaaacttacattattttctattttacaaattacactatcaatattacttggaaatcctgttgcctatgtatttctacacagatcaaagcttttcctgtggtcggaatgctctgattgaatccacaaatcttactagttgaatcaaaatcaacggcttaaatgtcaggatctctatctgaggagctgtagacccctgttgaggttttttttgtgtgtgttgttgtttgtttgttttttaccaaagtcccccgaaagatgaagagggcattgtcttgtaaaaggagggacgtgggaagatctgactagaagaaaaacatgtgtcataaaaattactgaatgctattagactatataaaagtcagttcttaaaagtcccttagcaaaaaagcacatttgtggacaacaagctgttcactttgattgatgtgtgatatacacataggagtatgtgttagattaactggaggcacattagggaggacatgaatgtcaggatgaagaagttggagtaactgggaataatttgattattttgagcagagaagataatcattgcagctgtgctttagaaagaccatctgtgagtcatgtgtaggacggattatagaaaagagtgaagacacagcaaccagccaggagactgttgtaaaccttcaagcaaagatagcaaaatttcagattaaatcagtggtgatgaaaaagaagagcttgagttggattctaataaatactcattggaaatgagtattccatttccatgtaaatggacagtaggctacaagtagcggataaagcagaagaaagcatcaaacacgcctcctagtacttgagcttgagaaattcagcttggtttgagtttgcatatagtgaatatttaaaaataaaagtagcttgtactctttcacataggaattacaggatgtagtcactatggaaggtcagttcactgtcttttaagaggcttctctcagtagcattgctttttctggtgaattcagcataaagactaggcttagaaattgactttgtctggaaattaaaggcatatcattttttcaggggtgacttcacattaaaaactatcataagacatataaaattagaatgcaaaattagtacattataataaaaaataattaatggccgaatatgaatatgtttagcttccattcttactttaagcataccttcatgggaaattacatcacataaatcaaaaacaggatgttctttgatgaacaaggaatcaacaatgaaagttggatgggtcaaatatttaacaacagccaggaacatccatctgccaacagaaattctgtttttaaaaacagaatatttagcattctctaatgcagtctactgcattaagtcaggtttgcatgataacctgacttttcattatgacttttttttggttctttatttaactgaccatcagatttaatatgttaatgaatgtaaataaaatgcatcaagagtatagtaaattcttttgagagtgggcagttttctaactctttaaggtatcattttgtatcttgattcattaaagttgactgtacaatttaattctgagtacagtggtgtcttttattttgcaatctacctcactgtataacccacatattaacaggagctttatagaatctgaggggctggcaggatataaagatatacattaatcaaggcaactattgttagtttgtagtaaatagtcctaaaataccactgtcttactacaacaaaggtttctttcttatacttatcacagtctaatgagggtttgttagttctccattgactctctcccattcttcacctaggggtgttcctggaggctgccctgattagctctcatcagtgggctcctttgccctctaacttctgatttggctcagtcagtggaggacaaccactgtatatgactgaagagcaagagaggggatttagctgcagtgtttatttctgcagtgtttcctttactggcagcatgttcctattaaaaggaaattctccagtcaagtggcattcgctgtacaactctctctgtgttctggaatctagtttcttcatttgttttctcaggcctaggagtagtaatatctctccaccattactagccctgggggtattacatcattcttcattgctaggtataaaatttgtcctcacctatataagagatgtcctgtaaatctcttctcaatttctcaacttgggtgtgccatatgctgtctacttgaactttgacatgtattctcaaaacagtgaagtggctatttaagctccttctttcttgtgatgctatcattttaaacacatgctctctaaggttgctgcagaagtggagacagagtgaggatgtttgcacaaggttttgtgcttagtcctaaacatggaagacattgctgcctatatgtcacatggctccaacataactgaagtggggttttctcatagactcagacaagttgggaaataatgggatttggtgagcatttggtattgtttgtgtcgtacatggagatatgcaataagcaaatggaaatgtggacattaactcaaaaggaaggatgatattaaatacataggagaactttagatggcacttgaatgttataccaattcaaccccatcatcagttttgaccacatctttccatttcttaaacatacttcgttcccactacagatgccatcttggttccttctctacctctattttgatattcacatagaccagtactacagatttcagttatgtggttcttctgggttccatctgtttcttttcattgtaactaacagaagcctggtctgatttgctaggtgaagctgtacaagtgaaagagaaatgttggagagatgtttcatggagaaaagatagccagacagactccagattacgtccacgaatatagaagcaagaagagaactcagtaagaggtatatgaatcaggctcagtaagaggtatatgaatcaggacaatatcatcaaagacagtccaggaaggaggttcaaaaaagaagacatggacagaagtaccaaattcagggatatgtgagaggacatgtggaaaagagctctggatattcatgctcacagtcttcaccaatagtggactgaaggaaaagatgtcattgaaggctgtacagccaccacaaagaggagggagtttcagtgcaaagagggcatgcatttctttcatcttcatccttacttctttccgaacttcaattctttgaacagtctacttgctacctgcctgaatcctttcttaatcttcttcacatgtactccttcaactccagaaataggttttctgccttttctttgttaggatcacatttcatttatgttctttaatccaagtcagttcccaatcattgcttaacaagacttggcttcttattgattctctagttcagttgcaatggtctattccaaatcttctccaaacaccttaagctgccatccaccatataggccttactcaatgatgctctacttttcttccttctacctaagacaactttgctttgacacctctgtaggcctaagaaagtggcctgcaaatatgttgctattcactcttctcacctcccaaaataccaccttaatctctcctgcttaatttgcatcttcaaatatttagtttctctcttattgcttacccctttgtctcaggatctaagaacaggtttagaacagataactgaaatctccatgacctcctttagataatacctttggtctcttccccaccagagtctgacaatttactaaacaaatgaccgttctcattggtttaatagccagttcttttcattttcccctgctgcccctctgcaggaattactaataagctgcagacttgggcagtagcaggcagtagggatggctagaggtgaacagtggcaggcagacccttctgatcctcaagcagcctgcctggaagtgagcatgttgcaggaatagtagtgttatctcttgagatagatttctcttgtgtcttctaatctccccccaatgccagtgttatgtgtgtgaaccacccttgaaaaccatcttctgctttccatttggctttccctttgggctggctgtaatatttgcttgctttcctatgtcaggactctttgaatgtatacctgtatcttgtagctatctcagggacctttacaccaagctacatattaaaatagttttctctatttagtaattctatgtttcttctttatcaggatattccttctcacttttatccccaaaatggaagaaataacacgttttaaaaattaattgcatagcacatttgcaagttatgttcccgtacttagtccagtttaagcctcacgccaaacttatgaggttgatattcttacttctatggtacagacaaattaattgaggcaagaagcagctcaggcccttgtctagttgactgctgtgactcatactttctgttcttggctgctgagtcccttgctccacatttctgctttcctaattgtttttgacacaaggaaatgagaacatgttggaaaaacaatagtctttctggatgagttgttgggctaagtgacctttaaggtatgttctaatctagaggtctttggttcttgcttgattatagtgcagtactattagacaatcaatgcaattgtcctagctgaatgacagggtagcagagacagtgaaatattatttttggcacttttttagtgttatctatttttgtcgatagaaaaataaatcccaaaatccaaagggaaaatatatatttatttgcacttagtgttcagtagtgaagtgcacgggtcatttgttagtggatgaatgtgggcaagttactttacctgtccatgatataactccttatgcataacgtgggatgaataacatgtctactcatagagtttttctgaggttcaaattagtgtacacatgtaaagtgtttataatggtgcctagcacttagtaagtcatcagttaatatcagctgctgttacattttgtaaaaatagtaaagccgtgtgtagcggtccgttctcacgctgctatgaagaaatacccaagcctggctaatttataaaggaaagaggtttaattgactcacaattccacatggctgggaaggctcaggaaacacacaatcatggcgaaaggggaagcgggcatagaccttcttcatatggtggcaggaaagagaagagtgaatgagtgaagggggaagagccccttataaaaccattggatctcatgagaagtcactagcacaagaacggcatggggagaaactgcccccatgattcaattacctccacctggtgtctcccttgacagtggggattatggggattacaatttaagatgagattttggttgggcacacagccaaaccatattactgtgtaaagaacttaccacttttaagaatagttaatattaattgacatacagtatctgaccatttattacttggaaaactctatctgcactatctcatttgacctaaattatcaggtagaaacaattatgatcacaatttaaaagatgagaaaactgaaatatagggaagttttttaacttaagtctcatcgatataaattatatgaaatgatttaaaaaggtgtgtctgaggagaggcagcataactaattagcataactaatatgcgaagcctttctggactcagttttggactatgtaacaattacacaaaattggaagccttttaaatgcctttgggaataataaataaagagttgcacctggatttcatttttaccgtaatcaaatgttttatattaggtattttggaaaactactggaatgaccagcaagattataataataattctggagccactttactattattgtctcatttatacctctcagcagaggctggagcacatggggactatgccattcccataaccatatgttttaccaccttgctctttgtcctgtagatgagcaagcaaagaagcatacaaagagcatcctataaaagagcacgaacaaagacaatgtttgaggagctctgttctttggtcttcccagagtaaatatcagcaatagtaggaaaaagtgtttaaaacacgtatgaggggaaaaaaaaaaactacaggaacgtcaattacaaatgattattttcaaaaataaaaccttctagcttttaactagtttatcgcagagctaaaccaatacagtttcatgcctcataacaatttaataaatattactaaaatatggcaactgctaccatggctcattagcaagctgttggtgtaatataaagttatccagaattgttttgggtagttggtttgtcaatataatgcacacagtaatctctgaagaaagtcaggaacatatggtccatgttcatcagctaaccccaggggactgcaccagaatctctcttcttacaactacatgacgttgagaggagagcttgagagaagatagggaaaaaaagaatgggtggaaagagaaacattgattactcaaaccataaaatcacacttgcaagcataaatcaagaatcacaaagctaacatcttcaaggaatctgttaaaatacaagttgaacattgtagcatcagaaattctcagaatatgaattctgaatcttgcttggcacacagctaaagttaatcatttcagcagcagcagtaaaatgctgcatatagcatgctactggccaacataaatgaatctaatgccatctatttaccaaaatcaagattcctttgaatatattttcaataatttatatgctaagatgtacatacatattacactctctctctcaaaagaaacgtcatattttctaatttaaagagacatatcttgtccaattaaattcgtttgagtaggaaactgtagagttaacaactgtcaatgatcatctatgtataagtagaattatacactttaaagattatgtttatttaataaccatccctatttcctgtaactgggcaatcagacatttttttgacccaaaatatgaccactgcattttgataactctaacagcacaagatgaggtctggctattagagccatataatgatgggtaagtattttgttttcttgggtgctttcacagtgtaaatattatctcagaagtgggtttttagggcaattcaagtaggatgcttaggaatgtacttttctttatttggaaaattttctcagatttcatttgctcagttttatacctattgatctttcattttaattttatctaaaaacctttcagttttgcagtgtgtcacaagtctgtgtaagctgcagcttcagccatctcttccatgcaatgtcaatcttgggtcgtgtgaagcatgtggctttttggaaattttctaagtaatgtaattgatgcaaaaaaatcaaggatatatattttcaatagccaagataatagatacataatcctttcaattaaaatttgtgttaattcaaggaagggtaggatcagcatatatattatgtgtttatcaagaatactctcctgagaaaattcatgaaatgagaagtaacagggagaaagttgaaacattgctataacatatcaaaatgagaggctctgcataaatgaatttataagaaaacattaaaattgccaagtataaagactttacagatacagagttaatattacctttatgtagacatttgaggcttggccaggctctcctcaatgagtctattttaaggtaaagttattaaagtccggctcccatctcacagatattatttgaagttgttttatgtggaagcagcctgcctcatgtgattgcactgtgaagctctccagctagaaggcggctatgtgacttgaaatttaaatataaagcaaattcagtcaggtgccaaggtgccagcctgctggaccaccatattgggaggaaggagaagtggagggcagggggttgaatggagattgggttgtgcgaaagagaagatttcaaactttggggctggaagagcacagggtgctgcaagaagcaatgtgttgggctgaataattcatgatgcagtactaattttgactctggagaaaattgctttctcactgtgccaaaagctaggcagtgagaccaaaaatcaaagaggaagctaaatggaggggagaaaacaccctaaatcaacaccatatcaaattgacaaactgtttaaggctgcaaaatgtattgtcaaaacatgtgagtagatattttaaaccttacctaaaattgagcatatttatgcctacttattttgagcaataataggtagatattaaataattattttcaaaagtagctccttgatattaatgcagagagttccagtaaggaagtaagcatttgcatttcattggaacttggtaaaaaaaaaaaaaaaggctgcatatcttggtatagtgtaagagatccatcatcattttgtacttacagaatcatatgggtgccagaaatgaccttttgagctaattaacagagctgccataaatatggaacttgataaatgttaatatttattggattcctaaaatccagatggtcttccttgtcttttcattctctttggaagataatattaaaataagaaccttctaaaatgcaaccttaggcatcttttcaaagtctcatttaattcttttctttaatggttaggaggacttatgagcatttctgaggaaaagtcgctgactgcctcttaagccttaaccaagctttaaactttagggatttccactcagatttaacaacattgagaattttggtcctagatttctttttctttaaagagttctttaaagagttaaagaaacttctgggcaggaaaatacaggaagcttagaatgaagatggttgaggtgttgtcttcctcctcttctttcattttgtttgttttgctttcaagagaaaagccagatacagctctggggagtcgaaaggcatccttggcaaagaatgcaatccctccagaggctgaataagcgtgcacaggatgaactcacagatagccacgccagtctcccagagcagagctgcatttccaaaaattcactttctggcaaagatgaggattttcctgtagtggtttgcattgctgaatggggctgaagaaacaccagtcttcaggactatttggaaattatagttaacaaaatctagagagccatgagcaatccaaagtaaaattcagttgagtgtgtagagccttccacatgagagggcatggtatgtaatttgcttcacttaatacagattttggagacagggcagcaggctggtgcacagggcatattttagagggaccataacacacccctatactagaaatgcagtgtactgtgtctcctcactagaaacctaaatacagcctctgaaaggcttgtcccttgggtgacaaagattgctgaggtttgatggagtgctgtgctctcagtatggagtagggggtggtggaaacaggaggcatatattttagttctaggacctccctacatttacgagttctttgactttggaccaagtcatttcagtttgcttggctttcttttcctcatatgtaaaatgatcattttatgttagtttgaaccatgggaaatagctgatatttgactaacctataaaaacagcaatttcacatggttcaaactaataaatgctcttgagacttgttctgaggagcaaagaagcacctcgttgtagataaacacatgcatgtaaattgtgtcctcttcctgctccagttacatcatctattgaacattttgtggagtttcaatgagataatatttggaaagcaaatagtagcactcaataaaagtcagtttctctcatcatgattccacacactttaatttcaactactgttttgaacttaacacttctccagtgttttacaatttacaaagtgctttcgcataagttaactgtttatgtgatttttgcaacccagtgataagacaatgaaagttccaaaaaagttgtcacttggactgaattatccagataggtagtaggatattgcacgtcgctgagtacaacatatggtcattgcccaataccgatgtctctaaattaataaaggcaaagtgggcatgtaggcatgtcactatctagtctactaatcagaaacagatcagtggtctttaaatattttgatcacacaactttttatgtgataatatttgaaacattaatatatgtgccatttatctatttagtatacattttcagtctctataaattatatatgcatggcagatgtaacatctgatgtgcattatgaaacatacgtaagtaaaaccttttaaaggaaaatatttaaaaagtaaatatattgcaagtcctaatattttctccctgcattccaaaggattgcacaattgcagctttttaaattgagatgcaattagcacagactggtggatttctatggtctttattgcccaggccctactttcggttcccaggaacaagaaagttttgggatttgtgatcaagtcagaccagcttccaagcttagtgaagctagaacataagcatgcagcttataagggaggacccaggtagagtggtaatgagagccttacttgtagtcagagcacttactatccaaaactgtggcctcatgcagggcacaagcaccctcaacctcaatttctaatacgggtttatttgaggagtagaaaagaataaaatacaggttgaacatctgtaatctgaaaatctaaatctgaaatttttcaaaactataaactttttgagttctggcatgatatcacaagttgaaaatcccacatctgacctcatagtcaaaacacagtcaaaactttgtttcatgcacaataaatattacataaaattatcttctagattttgtgtataaggtggatatgaaacaaaagtgaattctgtgtttagacttcagtctcatcctcaagatattatgtatgtgtatatattccaaaattcaaaaggaaatccaaaatctgaaacacttgtactctgaagcatgttagataaatgatatggaacctcaacctgtattctattgaaagcacttgctaatctataatatactataaaatataaggtattatcaatgtgtttatgtttactgtgtatcccagcattttaaatactgtaggcacacagcatgagtttaatgaatgaatgagcaaaaacattaattaattaaaaataatacattaccttactatgtcacatatgctatttccagaaacagaagacacaacaaaatatgttttcaaagcaagtttttttgttttgttatcattttatataataggaatctggaggtaagtagcaccagagtcggcttattcgactgctcaaacccattggtaagaaccctggttctgtctgtcttccactgagccacgtggaggcactgggctctttctctttggctagatctactgaatttctcagacgctgccacagttccaagcagctatgaagatggcagtgtctggaggcattggaaagggaacattctgttctgacaaagtgtttttttaaaagaaaagaggccaaatattcactgagactcccttccccttaggctcagtggctggtagtatgtcgtagcccattatttcactagtccaggacaaaagcaatgatgctaataggatttctttatcttgagtttcatgtcttagggttggagaagggaccaagcctcccctgaaagctgaggggtttatggtcaagaagaaagagtaactatggccacctttaggtcaccagccaataatactgcttctctatcctgttctgctgtgacatttgtcccagcaggtgttccagtctgtcctacagtagtgagaccacctgatatggtgaggaaggcaggtaattgatcttactccatcatatcatcacatctatttccaccccccgcccttggagacaaggtctcactccatcatttaggccggaatgcagtggtgcaatcatagctcattgtagtctcaaacacctgggcccaagtgatcctcactgtagtctcccaagtagctaggactacaggcacatgccaccacacctggctaattaaaaaaaattttttttgcacagagatgggggtcttgatatgttgcccaggctggtctggaactcctggccacaagtgatcctcccacctcagcctcccaaagcactgggattactgttgtgagccaccatgaccagccccatcacttcttttgtaggtttgtatttgtttttatttttgacaaagacttttatttcacggtgacttcttcacaagtttcctcagatgctagtctgaacaaaggagagcagggaactagaaatgtagactttctgttttttccagctatggcatcactgatctcatccatcttactaaagtttgtgcagtcttgatcattccccattcccccaacatgatggcaaataccagttaagtactcatatctaaagaaatcctttattaacaggaagttaattaagaacatgtacatctctgacattcatcattacaatgagtagaaattaattttttcaatttcagttaaattttattcagcaaaaagctttaacctcttataataagatgtgaagaattatgagaaattatttgctgtatttctggaacgaatgcatttaataataggtcagatgagcaaaaatggttgtaattcaaatttgaatagagaatttcttcggtgatagcaaatggaacaatatggcttttataagtaatattttgattttaaattatttaaaatattcagatgctattctagttttaatccactttttgctttctttcccagcatcctctgaaagtttatatgctagaggtctctccttcagccactccttgatcatctccaattagaaatctatttatttttcatcagaaatgatcaatgctacaagtctgattaatatgagtggtgtgtatatgtgtgtgtgtgcacatgaattttagacagttttctgcagaatcatcttctgttactatttttcaagacaatactatgacaagccaatgtgttctgaataaattatgcaatcgatgggtgaagcaggcatttgctttccagtattatacatcccaacttgtatcacacaggcagacttctgttgacaacactattgacctatatatgaaactttgaaactctgttttacatttacaaaatttgatatttctgatattctatgggcttcactttttgacatcatgcctttgtacttttatgcaatttgataattatattcagccctttataaatagttaaaataatgtttaatcatctatggtaaatgtgtaaattccttactacacactttctgattttgtgtgtgatttgtcaggaaaaattcgtggtttgtttatattttttatgttttccttttttttttttttttttttttgagacagaatttctctcttttgcccaggctggagtgcaatggcgcgatctcggctcactgcaacctccgcctcccaggttcaagcgattctcctgcctcagcctcccaagtagagtagctaggattacaggcacacactgcacactgccactactggctaatttttggtatttttagcagagacagggtttcaccatgttggccaggctggtcttgaactcctgacctcaggtgatccacctgcctcggcctcccaaagtgctgggattacatgcacgaaccactgcgcctggcctttttttttatgttttctacacaagaccagattatattttttagaactaaggaaaaggagcacttagaaagtgtggaaaatcaatgaccttgcaatttgatatatactctggagtatactctgaaatctcaatagtttacagacaagatagtagaaattagaaaatacattttatatatatgtgtgtgtgtgtgtgtgtgtgtatgtgtctctatctatacatatacacacacatatatgcacatatatgtgtgtgtgtacacatatgtatacatatgtatgtatatatctgggtgtgtgtgtgtgtgtgtgtgtatagatatatatagatatatatatatatatacccttgtgctaagggatatattttctaatatgtattcatgtatttttataaatcttaaattttcttcagtctcatagctacagactctgtaatgttttttgttaaactgaaaataatcatctctggtgaatctttctaaactgtgtatttctaaatgtttttaccagtattattgtgtttttggaatcacattactttttagtgtagtgatagcaagtatagcgagttaatgctttttttaaattagcaaattaatgtgaagatcagatctcaaatatcaggttgtctgatcttattcagtatgccatttggcttaagaagttctcattttgtttctgcagttcactcatactgagcaaatctagacaaaacaaatcctgttgctcacttggaatttagataattgtttcacaattcaaagaaagaagttaattagcatgactttttttcaattaaaagttatttattaaattttctttcctgaaactgttcatttcctaggaaggtctagaatggaacaaatataaaactaagaaacagcagcttttactccatgtgacaaggttttgttgagggtgcctgtggggctggccatatttgtcatgtgtgtaatgtggctgtgcctctggcaagctgtaagctggtagttagtgtggagtctgcattccagctacctgggtgccatcgctcttaacacacttcttagctcagatgttccaatatttgttctcctgacctacaacattaggaccacgtgggaacttgctagattctgaggctccctcccagactttctaaattagatactctgagggtgaggcccagaatctgtgttttaatgtgctcttgaggttattctgattccacctaatgcttgagaagcactgccctagcttctgtcttgggcaacactcctgaatcagtgcctagcttttcccagctgtaaaatgtaaaatacaacatttttctcgtagaattattgtgataattcaagaaaatcatgtaaagttatttctgcaatagttgcctaacagatagagtgctctaaggacactgagcgttcttcaaaagcagtatggcctgtgtgctcccatgtctgagcacatttgaaaaccagcctctaaaattacacttcctcctctatcaatgattgcagaatcgaatgttgcaaatgcatggcagtaatacatcctttgaagaatgaagtgttattaaaatttcattccataatatttgtattagttttgtattactcaaaaggcctatcttattttactttcttaatgaaattaatttttatttcactatgaatatttttttctagcccctactttcatttccaaattttctcattttctttttagtctggatatttcctagataatttatttcaacattctagtactgtataatctcaaatacccaaagaaaatacattttttgaaatattgatgaactaaaaccaataggtatgaatgagtcgatcctgtgtttaatctacatgtgagatatcacctattctattccatgcaaataggaaggtaaatatgatgaagtcattaataataacgaaataaggctattttatataagaatttaggttatgtcccatacaaattaacagcataatattacgtgattagtcttcctgatactaatattttcctaatttattcttttcaccagctgcattaaaattcaccgcaaagattcagtccaaggttctcacagggaactaaaggttaaaatgtgtttgttagccaatatacaagactctgtaatcttatatactacattggcagggactgttgggattcagttctgttcagccatggaggacacactctgtgttgccctgagactgtggaaaatacagcgtctataacatatccccttcttacagaggtatgcatctttgaactcagaactctcctttgctactctcattcaagacactgtacagcccagaacttccagcctgtgggtttttctcaccccctttctctgcctgagccctctgctcagggtgggattttcatgatctccccacatatctttcttcttctgtctctgcttttcctctcttcccaaagctagaaagccatctcctagcttaattaccacctcccatgatcttgtctatttgttgctattaatctgaccttaataaaagtgtttcctgagatttcaccttatggacatttggattcaaagtaagggctagaaatggagagttagacgaaggatagatgagctgattgcatctagggaagtcaaggagttgggcttgcattgcagagaatggctaagaaaggagaccaatctatgggatacttaaaaaacctattaaatctgaatatctgagtttgtccattattagaattctttcactaagtgcttcttaaaatgatcaaagaaacgtttgggattgtgagaaaaacagaaacattgtcctgtgcatatattaagtgtgctatatcaaataatatttcatctttagccatcagtaacacatttgttcttagtatatatatgtcaatctaaaaagggtttctcaaccttaacattattaaatttttaggttaaatattgttttgtttgggtgtgggccgccctggcattgcagcttctctagcctctacatactagatgctggtagctatgtgacccctcaaaaaaattttttggcaataaaaaatatcttcagacattgtcagatgtcttctggggggcgtagtcatccaaactcgagattcgctggtccagactgtaaaaattatcaaactactcttgggaaagatgaatctattttaagatccacttgcaagctacatctacataaatgtccattaacctttagtactttgtgacctgattttgtgtttcttcttgcatgattattttttgggccctcaatatatatttgttaattctatttcttcagtttctctagatgctttatctggccaaatagtgtatcatagcaaattagttctagaacctcacttgtcttaatattagttaattggaattaatatttgttaattctatttctttcatttttctagatgccttatctcgccaaatagtgtatcctggcaaattagttctagattctcaatagtcttattattcgtaggtacacaatagtccaatgcattaaaatgactttccttttaatagttctacgtgaataaaaatgtatttcctggcaaatttcacctcaatgctgcaaatccattgaaaaagggaataatacagtatcacgatacagggagaaaaacttagaaacacaataagatatacatacacacaactttacgagagtaaataataagtaaagatatatatgtatacacacacacatatactgatacagatcactgcaagaaaatcacaaataccaaagtcaaccagaagacgtgagtagagaaaaatagacaacaaaacaacaaataatgcaaattaaagtgagataatcattttgctgtcaagataggagaaaaaccaagagtgggaagatattatgattcttcaatcatgtgggcatgtatctttactgtgtgtgtgtgtgtgtgtgtgtgtttatctgctgagggcctttgaatactctttccttgctcagaacaaatagacaaatatataattaaggcacctaacaatacagaccatattttcagggatatagcaactaaaaggtcttaggaaggccaactcaaatccaagcacatggattccagctggggacaggagtgaaaggagtggatttcttgtgtctgtgagcctagagtgaaaaacagcttcaggaaaccttcactttgttatgtatgggatgaaattgaaatcaagtgtattgtgttagggggatcctacaggaagaagatctgggagatttttcttgaggtttgggggcaggcatttagctgagggtggacattgaggagaatctggagggcttttattagaaatatgcttccataccttgcaaaaaactccaaaatatcacacctgtttctcaataccacatgctttgtacatgccatataactatttttgattaccaaatttcattttgagttttgatactagttttaaaattacagttatagctgagcatcatagcctgtagtcctagctactagggagacagaggcaagaggcttacaacacaagcctggacaacatagtgaaatcctatctctacaaaaaaatatttaaaaattagtcaggaatgatgacttgtgcttgcagttccagctgcttcagaggattgcttgagcccaggagttggatgctgcagtgagctatgatcataccatcacatgccagcctgggtgacagaagaagacactattgtctcaaaaaataaaacaacagttgttcaggatcattaggaatatatttaatcaatgctttttcagaaatggtggtttaaaaataagtaggctaggaaggaagtcctaagtaggtattctggtctcagacttgtgcttcctgcaacacctttaatatctataaaataattagagtttttgattgtggagtaggcttgatttggaactgaggatttttttctagacatatattttaatttgagtttcactcactgccaaaaaaaaaaattggcaagacagagaaagaggaaaaaaaaaaaacaggccacaaaatgtaaaagtcaaaagcagtcattccaaatttgtgtcttatatattctctcagactttgctgtcttctttatgtttcaacatttttcagatagcatcattaatgaacagccttccagcccccctccataatgcagctttttgatcctagtgcccaactggcttcaatcaattcctctgaccatgcagtttatgactctacaaaacctgccaggactcgtttccttagtattagatgcaggcaggtagaaattgagagatgattccacataatgctcatcaaagcagaaaaaaatcaaacctaatgcacaacagggttacaaagagaaaaagttaagcagtctgtattaaaaacaaaaggaaataacagggacagaagaaaaagagaaaataaaacaagtgatttcatgtaggtgctatagaatctttaaccaaaccacaggctctgatgaatgatctcttctgcctgagactcaggactgtcatggtccttatgtccaggaaaagagccagctcttttattgagttgccaagagttgtcactgaagccatcctgaagtttccttgcttctagttagataggaagagaaacacaaatacattctccctcgggacggacacttccaaactaaccactcccatccagtggtaacctactcccaaatcctccaggtggcctactacaccctgctttcttctgcttgcagttgcctgacatgacattgctcaccctttcttcttgtaagtgttacctttttctgtgtccctttgttatagatgtttggcctatagtggaagggccttacatttgtgtcacataaatcatgtcatgttattcagcccattacattttatgtcaagtaataccttatggtattttacctttatcaatataaaacaaatttcttttgttttaagtttttgccctaaacttcaatattatctggtgatggagtggtaaacaggctcttcattcatggagcttataatctagtgtgagtaatagaatagaacaatttcttaaataaatcaggagttaacgccgattgtgatgagaactcaggagaagtgtaaggtatgttggaaacaaggagcataagttggatgagcgatttagacaagtattccatatgggacagacagttctgcctgtctgaaggacacaaaggatgtaccaaggttatgtttctagacccagttgattagacccctgggtttctgctcttgagacattgccagaggccaaattaggccaagtccctgggtgtgtttgcctcctgtagggcatttctaaaaccaattactaccttcagatcaagaacattttctcttataacatctcttgaattgtttgggttctccttttaagaataacaagtcatccctgcaagctctttattttctgttctctgtatccaccgtgttttccctatttttgtttctttgttcttttcttctgaattctaggtagacttaagttggtcttccaaattgttggcatcaatctggctcttcagtgccccaatgtggatttctagtatgattttccgtggtaattttctgtatgtcacatatactttttacatcctaatatgtggctttattttcctgtcctgttctcttcattttgcttttggctagcttgtatagaaacatgttatttttgcatttgtatggaagtcatgttgcttttgaattgtaacaaaattgaaattttcttctggatcctgcagtagattagcagaaaatcttctttttgagaaacttaagtatttcctctcaggatttcttcagttagcaattcactaggaaacagaacccgaaacaattctttcagtgtagattctttattgaaaggcaatgcatgggacagccagaacaaccctgtctactccaaaggggagaacagtcagacgtgcctgcagccagccccagcagctgcagctggaatgccggagagccaaccaagggtctagaacatggataaagctgagataatctcagggtgtgtgtgttactttgaatgtatcagagtacttaatttctcaaaaaaacatatcacaagacaggctgtctgttcatataggtaatagtctgcaccctagatctgtatttggaagaagcttttctacaactgcaggccaattgctattcctggtgggtatttactaactcacttctgcttcaccttggccgcttttccccctggcctatcaactcagttggagagaatcagaactggacattttgaacaatggaaaaaattgatttcctcctaaatatactactagggtttttgctgcctttgtgcactcagaatgcagtgtagtaatattccagcaaccaccccaaacacacacacacacacacacacacacacacacacacacacatacacaccacccacgttcttctggatgccccactaacatatacaggcacacacttcacagacacacactccacgtgttctgcctaatttcttggtattcttttctcttataaatgtagtcaactagcaggagggcaggaataccaaggaaaaggaaccagaattctggcgcttccagaaagcagcaccttagggctataggcacagctattattttttggccagatcacaacctgtaagagatacaaagtgagtctgtttccttttctacataacctctgtcttatcatgacagaaaatgttgccggattctgggccaaagtatgaaacagcatcagaaaagccagttgtgtcatctatccagggatgccaccatgtgagaacaaggtcccctaatattctagagtgcctggcctccatgcagggacaattgtgtatttatttacaagaatgtgagcaccaacactgcagagtttaggcatttatgttcattgccgtatcctcagcacttacaacagagcctggattctaggaggtggctaatactttattttggtgaaatatttgattagagcagttatgtgattattggctgtcttcccctagactaggagttccctgaaggcagcactatactcttttctttgccaggttatcttctgcttcaggtacagcatctagaacataaaaagtaaatacatatcattttatgaataaaaaagcacttttagaatgcagaaagcagaatgactagtagtatagctgtgttcatgtctgcccctcaaataaactaagtgacctgacgatagtgactcttgtattcatctttgaacttctgacaaacccagcacaattcttttaagtaagtccttgcttactaattatttggttgaataagcaaacaaatggaaacatccataatattagcaaatatgatgcaagacatgaaaagccttatgcattgaaatctacatgacttaaccctagaaggctgaagtgataccacaccaggaaaattactaacttaacagaacacatcaaaataaaacattgttcaaatctatataattatctcaattgccaaaaaagtatctgataaaaattcaatagctattcatcataagcacagtaaaaatcataggaaagagggtttcttttttcacaggggaaaaattaaatgtttcaacaagcattacctttaatgtagaaatatgagactttctaaaacaaacaagaataatatgaacatagctcactttaccattgctgctacaattatttattattttaatagtaaaattattaaatattaaggaaaagaatattaaaaataaaatcaccagacctcacaatattcagtatacttttaaaaatgaacttgcaggaaaattgttgtttcaaatgtgtttactaggaagaaaaaaatgcaattatgtaggattatgattaagaccacaaaagataagtaaaaatgatacattaaatgctaatgtggggaaatagaagacaaaagagatgcatgttaaaaaattacaagttctaactacggtattaacacctaaaatcagttgaatatcatttgcaaggaaagaatatcgtttctttaaaaaacatatgctactttttctgttattaccactagaagctacattaattagacactgacatataataggatagactctaagtataaattatttctcatgcacatagcaccttgattggtagatattattgtcttctttcttccaggtaaaagtagagggtgagaggatgctcagcaggtggaggaaatataccaagccagggcacaggtttggttctgaatgaagggcatgttaccctacaacagtatgaacaagaaaacatgagtaacacaaaagcactagatgaacatatacacaagcgaacatcctcacacacaaacatctagtacaaataattaaactcagagtaattatcagtgtgattatgagaaagagataactcatgtcccacacagatgtaattaactatgtgcaaggcattgagtaaggtcttaggatattcctcaggtttggaatccccttcctgcattttcacttgttaaaataaaatcaccaaggaatatttacagtggaatatttgagagaaagtttgtatatagtttatttagtgttatttgtgttttaattctactttagtgttttgttgaagtatattaagatcacgtggcatatttctgtcataatgtcatttagtaagctctctccatacccgtttcttctacgttattaattttcttgtcgagacttgtattacttttttattgttgtttgttccacttaaaatagggccattttagtatctccaaaaacaatactatttctaattttcttacattttaccccaagaatctatccatatattactcaaaaaattgaaaaaaggcaaacttccaaacaacatgttaaggaaataaacacacttcagcatccagttttccctaaaggagaagcaattactcctgggatactaaatgagatttgtctgtggctcctctttgagaccagttttcctcaccagggatgacttattcatttgtacatcaaggaattctcagctttcttaccacttctagaagctggggacatttgatcatgtgtaggactccttacatttctgaaacacatctcagaaaagcaggtatagctaagccaacattttagaagtgcagaaaggcattttctggaggcacaccctccaatgctgcttttggagtccttgtgagattttgatttgaatcctccttctgtacctattagctatttgaacactgatgaggtactaaacctctatgaaccctaagtttttgtttattatattaaaaataatgctagcccttatatcctagaattgtgaggataattattagcaggtcatatgatagcaaatattgactgggttcttaacacacttcaggcattgtgcatgctatatgtttgaatccatctttgtatttaatgctaaccactctatgaaatagttgttatttatctccatttataactaggaaactgagattcaaattgctcatgtaatttggccaaagtctcacagttagttgtccagattcaaattccccatctattggactcatagtctctatacttccaggatggttttcacacctattcagtgctcaataattgtcagtcatcactgttgttattattgggagaactttgaaacacatttcccagaaactctcaattgacaaatgtggagccaagtctcttttcaagataggaaatttgtcttgtcttttctgtatatgtgctataacatattgcttgccttcttgtgaatccactaagagtcacatgttggcggtatgtatgacatgttcatgtctgtctcctttgtcaggtctctcatggtccagacatgagaaggtcatctttccttattcttcttcctcatttccacccactgcagcttgtacttgggctgtttgtatcttggtaagtgcaggagcgcttcagttcatcatcactgctgctttttcctctttccacatactggatcttgcattaatgactttaaatttggaaccattcattctactgtggctgttgggctttctctgtctttatagagtctcattgcaggaatacttactaagctcctgaaaactgacacacccttgcatttgacaactggctcattattattattattattattttattgtatcatttattgattttgaacttgatgctgggtttgattaagggaaaaaacttaaagggtttttcttttttaacttgcttatcttttgaccttatatctaatttcatctcatgacaaagaagagacatgaaatgtatttgaggtggtacactgatgattccatctgaatattgctttgtcattgttttgattagaaacaataaatggtgttgacaaactctgggaatgatttttataatgaaagagaatagtgaaagtggagaagtttcaataaatgatttttaaataaaatgcttttcttgaatataaaaaacatggtgttggcagatgacattgtaggaaatattactccaagatagactggtaagccttttaccctttccacttctctgtcacttcttgtctttctagaacatctcattactttcctttatgaattcttcccccaaggctctggtgttaggggcagccttcattttccatttcagttcaagggacttaccacttaatttaagtttcctcaagtctgaccctcaactccaaagttccactcatcatttcactttttagagcagagatcacctgcatgatagtgtacctattgatggtccctgatgtttcagaggcccctacttgtatattcagatgagaatatcaacagggccttcctcacataactgtaggaaaaggtcaaaacccagaccccatagagagacctgggacacttctaatttatgaatgcaatttttaaaaagatttaaaaattaaatgctatgacacaaaatacaatacaataggagtgagtgattcacaagatagtatgagtatatataaacataaatttatgtgggtgttgtagagttgaattcaagttcaaatttggggctttttgtaaatgtgagtcacagattaatttctgacatattgtacccctcattagggatacagcattatgataaatttctaagagaaaaataactaaatcacattgtggtcatgtttttagtgggaataaaacttaacctagaagagaaagcatgtaatgcttcattcaaatatgatattgatttgctgtgtggccatggataaacaacataacttcccaggacttttttcattttttttttattggggatagtattagttaccacattgaatgtaactggatatggtgtaaggacaaattaatttgtagatatgaaatatatttgaactataaaagacttttggacttaaaatggtaatgatgatacagccccctttcctcatgaaaattaatttaaaataactagaaggaaattcaacctttattgaaaagaatctttggccaaatactggaagaaaggctccagagcccagtatgccatttcagaagtagatggtatgcccttctgagaaaacaatctcttatttgcaacaatgcactctgtggcaagtgcatgcctggaagccactgaacgtgatgaagcaactggagggtcggaggctgagtcaggagacattgagacttaccacttgtatgaaaggagtcagacagtgaagcaagcttcaagggaaactccttcggaagcagtcctgagtgacatctctctctcgcctggggagaattaaaggctaaactagatataggaatacactttaatgcatttcatggtcagcctctgacaattactgttgtgctatatcccactctgaccctcctcccatagttccaagtactcactatattcaaaggtaaattaccagcatatagtctatgaagactcaccatgtgtaaaagggaccattgcagcataaataccaaggtattaaaataattagaatagaaagcagaatagaaagcagttgaaaaatattcaccagaaaaattttgtcatggagaaaatgaaattaattcccaaatgtattactaaattaagcaatagacattaacaaaacaataacttctttgaaataatgtctcaaagcagacatttgggaaacagaaattcaggaagaaatatagcaaggaaatagaaggaaatgactgttaagcagataaaacaagaaaattagtatattagtttgttctcatgctgctataaagaactacccaagactgggtaatttataaaggaaagaggtttaattgactcacagttctgcattgcttgggaggcctcaggaaacttacaatcatggcagaagaggaaacaaccatgtccttcttcacatggcagcaggagagagaagtgcagagcgaagcagggaaaagccccttataaaaccatcagatcttgtgagaactcactcagtagcacaagcacaacatgggggaaactgcccccatgatctaaccacctcccatgaggattacaattcaagttgagattttagttgaggacacaggcaaaccatattaagtataggaaagaatagtagaaaagaatgttacatccaaagttacattggaaataacctaaaggagaatagaaacggaaaatatcaaaaagcatgtgaacagtgaaaaaatgaaacaaaataaattaacagtgagttaaaacaattgtcaggatagatgaaaataatctgttagaaaatccaaacagaaaaaagaaaagttcagcatatgcataagtggtgtgcctgaaaaggagaaacgaatatatggagaaaaaaaatgtttaaagttactttttccagatgtgaagaagttttgagaataaacatttttgacttttaatcttttgtttggaagcccaacattatgaaaaaaattatgcaaaatgatcaccgtcaatatcctaatccacttaccttttaaaacacagtcatccgttggtatcttcaagagattagttccagggctcccagaagataccagaattcactgatgctcaggttctttggggtatgtattcagaaaccaccaatatagaaggccaactagaacagggaatcttttggggagtctgaaaggagatcaaatcctaaacaaagggtgacttcagaattcctctcagtaacattccacattaggaaaagaacaggtcaatgcctttccagtgttttcaggaaaaggcagtgtaacccatgttcctagactcagtgaatgtatcttttaaagtaaggcaactgacaaacagttttcaacatgaaatactgctcagaatctagttgccagattcctttaaaaatattctgacaatgaaaatgaatagaggaattacagcaaaagaactgttgataaacattaaatatgttgaaaatattaaatatttctatctgcattgataagtaaaaatatttctgagaattatgtttacagaacagaatgaaaatgttacaaagaataataacattgaaataatttatctgatacaatttaggatgaaaagtggaagagaaggtgagaggtggtatgcatatggtgaattcttcatcttttatagctgaaggcaaaaaaatgccactcaatggtgatttattaaataacatagcataaacatgcaaaggcataaaaatgtagtaaaagtgtgtaaacaattaaaattagataatgcagtaagagaagtgattggagactaagtggaggtataaattttgtcagtattacagtgaatggtcagtagataataaagaaatgtaggattataaatattatattggccaggcacagtggctcatgcctgtaatcccaggactttgggaggccgaggagggtggatcacctaaggtcaggagttcgagaccagcctggccaatatggtgaaaccccgtctctactaaaaatacaaaaattagccaggcatggtggcaggtgcccgtaatcccatctgttcgggaggctgaggcaggagaatcacttgaacctaggaaggttcaagtgaggttgcagtgagccatgattgtgccattgcactccaggctgggtgacaagagcgagactccgtctcaaaaaaataagaaataaaaaaatatcacattgtatttaaaaggtaacaaaaaaggtaatagaaaaacatgagaccttcagattattaatagtaacacaaacaggcacaaaaagaacaaagtgaaatattgaaaaaaaaaacctagtattatcatgaggcatactgaaacacaatataactaattctgaaaatatctaccatattaataaacgcattatttatcaaattttaataagaaagttatttccacaagaaatcaataggaatggatatctgtgcatcacataacatagactcacattccataatggaaaatctacagaaatttcagggcaaaagagaagaaaacatattagttgcaggagacataattcagtgtgtgaaaactgtcagtaaaaattagtaagcaaatagaagaccactaaaacatgattgatttcaaaatgttacatatcattgtgtttttctccattaaagatatgtcttcataaattctctaaaatttttagttaaacagttttctcttaaattggattaatagtttctgaattaagaacatttaaaaaatatctttaagaaactgctttcaactttatctttcaagtttttggctactcacacttagtcttcactgactcctacatgaactgaaactctaagcataggactaagagcaagtattataaatttgaaggcccatttgcaaattactatggtaggtctctcagttttgcaaagaatcagatgttcagttggctgggaggatatagaaaggaaaaatagagtcccttctctcaaaacccccaagtccagcagggaaaacacaccttatatatcataataaatagaatatgcaagataagctccagtgtatgcagggggaaagggactttggtggaagcagctaaaaggatcttgtaaaaatataaattaacgtcttatgatgcaagaatccagcctgttttaacatggattggatgacttgcttatcagagacttggaacaaaaaatagtggatatggatcacaagttttctgtgatctttggaggaagaatatgacaaaatcctgtatgttgtccttgggataccctcctgacatccccactccctctgtgttgcttgtgcttacagtagagatggctcttctcctaacaggtgctcctcaaattccagatctcattttgctgtcttctctcaggtacctcagacttctgaccgtttttctggttactaatacagactttcattgtttttctcttttgctgcatctataaatattatgatttgtcagaaattttgttttgtatacatttatgagacaatcggccagatggggctacaagaggagacacaggagagactcgagaaaataaagtattttctactcacaggtcctagagacaggaggcatgccatacatggcaacatggggaagaccagagtggtcaggaggcagaaacaggagcaaggtaagttgtaaggcatggcctttgttggggtttctgagagaagggtaaggcaggataggatgaacagtttaggactactttgaataatttctccagaatttgggaaacaggagtgttctctagttgcctggtacctggccctgggttgcttaagacagaagaatattgtttccagggtatgtgggcaaggtagaggaaatgtggctctgggttggttagtttgcgtgcttcaggctggtccctttcctatcttaagtattggcggctgttcgcagtggctcacgcctgtaatcccagcacttcgggaggccgaggcaggcggatcacgaggtcaggagatcaagaccatcctggctaacacggtgaaactccgtctctactaaaaatacaaaaaaattagccgggcatggtggtaggcacctgtagtcccagctaatggggaggctgaagcaggagaatggtgtgtacccgggaggcggagcttgcagtgacccaagatggcgccactgcactccagcctgggcgacagagcgagactccatctcaaaaacaaaacaaaacaaaacaaaaaaagaattggctagcctcaagcaaaggtgatctcttccccagttagaaagattttctaagatatcaaaacatcacaaggtacagaaaatttaaatatacatttatctacaatacagccttgttctgggccttcttttccctcactttctttctatcatgactttcaatccagtagcctaaaatgccatctatcttctaatgacttgcctgagattcactcttgtgtatctaactgcctctttgccccatgaattttcagatatgtccaaaacatacctcttggttctcctccccactcttgcttctccctcagtcttccctttcaagataaatggcaccatcagccaaccaggaggtcaaaccagaaaccattggcttctttaattccattactcttcccttcctatcccacaagcacctacttacacccacatttaagaaccttttaaccatctactcatccacaaaacttagttcttccttcaacagaaatctcaaattcagcaacttccctacacttctgctgccactgccactatcaccctgcaccaagcaagccgctttcatcttaccccttttctgtcacagtatccccccatcatattctccacatttatactcctagctgctctacaaaccatttttgattaatattggtaaaacaaacgacaatcactccccggctcaaaaccattctcattgatttctagctgtattcaggatgaaacatgcaaaccttaccagggtccaaatgccttcctagcataacctgttcacttctctggtttttccaacataatttttttcactcttctttctcccccaactcactacgctccaataccaatggtcttttatcagtttctggaacgtgttcctggtcttgatttaaaggaaatgtaattaaataaagatctccatagaaacactgtctctgtctactctgtctaaattattcccttcctatggtattttccatttcagcagtttgtctgtttccttcaaagcagctgatcacagttgcgattacatttacttgtgaccttattttgtgttttgtcatctggacgttatgttccaggagagtagggataatatgaatggttttctcaccatcagatctccagttcaatcacagagtaataacattataggcaatcaagggtagacacatgcaggacatacccaataaataattgttgaatgaatgatttaagttcaatttgttacaatattttattcaaaatagagcaatcattattaacaaaacatgaaagagaaaaatgagagagagctacagcagggacagcatcgtaaaagttaactgggatttgggcttctattagtggcttcagctcactaagatctttataccaagtcaagtcaggagaggctggagagagagctgagaaggctggctgacaaggctgtctacactccaccttacctgccatggttgtgaccatgctatgcagcgggtctccactgataactttcttccttcagccgtgcttgccttgttactgtgtaatcgggatgtgtttgtatttcttattttggcagaaacactcaagagaaggggcttcattttagtctcaacttacaactgctctctccaataatttttgtgtgtgacatatcctaattaggctcagtgtcttcctgcattcccagcaacttgagtgacagatcattctattaaatttggggagcaatgagactagggcaggggttggccagcaatggcctgaagtccagatccagcctgccagttgtttttgtaagcaacaaattttttggaacacagctgcaccctttcatgtacgtatcattcatgactgccttcctgcaaaaatattagtactgagttgatggatattgatggtggagttcacaaagctgaaaaataacttactatctgcccctttacaggaaaagtttgccaatgtctggactagagtatgaacttctttattctgagccttagatacagtattagaatagtttaactatttttctaacatctctatttatacattattaattaatttcagggaaaattggattttgtttacatcttccaatatcatttagttcagactctattatgttccaggcatttacttaatcgataaagaaagctttttgtgacctttccatctcaagtaatctcccactgctcttaaggcctatattgttttgccaccctagcactttatctctcatagagctctatctcacctggtgctttatctcccgtagcacacagcattttgaccttgtatgtgaatcatacgtgtgcatggctaatctagcctactagtgtggcattgtgtaaagaaaattgtattttgagaatgacagattgctaggctctgagctgcatactagttgggattctgcctcttttgctgacctggaaagttgtccagcgtgtgtcacttggtagacgttttatcatgcatgaatgagtccgcattatgcctctatattaatagagacttgcctccttgatttttgtagatcacagtagaactggatctacaatgaacattatttagcatggcccatccctgccacacacacacatagacacgcacacacacacagacacagacacacacacacatacatacacacacacacccctcactctcactggtgtcttgtgtccactgtttctaatcattaaatagaggataggtttggacactgtacttttacagtcagtcgttagaatcctaactctgtcatttattgagggactttgaacaagatacaaaagatgacctttaatttcctcatcttttaaatgtagctaatcacagccaccttccagtactgtagtaggaagtaaatgagatagcaagcacaactggaaggagctggcatagctcataactcactgtaagtggtcagtagaggtcagttttgttcacaaccaaggcctgcgacttccactccaaaatgctgagggaaaccctgcttctcagttacctgaattgtagtctccaggggtgtgaaagccagggtgcttcttttaatttcctgctccccgtgatttcagatcccctcattcagtctttgccatccttgtacattgcactacaatctgccacagtgtggaagccagaactctgagtcattactgctgttccctgcatccttaaggcctcggaaatatatctttactcagtccacttctcacttagtttctcagtcatctgtttaacccaaactatgattttattttccctggtctgattgaaaaatcttcatcctggcctccctctatctccttctccatatgaaaactagaactttttttttttttttttttttttgagacagagtctcgctctgttgcccaggctggagtgcagtggtgcgatctccgcctactgcaagctccgcctcccgggttcatgccattctcttgcctcagcctcctgagtagctgggactacagacgcccaccacaacgcccagctagctttttgtatttttagtagagacggggtttcaccgtgttagccaggatggtctcgatctcctgaccttgtggtccgcccaccttggcctcccaaagtactgggattacaggtgtgagccagcgcacccggcctaaaaaaactagaactcttaaacacatatatcagacaatgtcttttcaaaaactcctaatgatttctaatgaagattaacataatatcagatccctatgcagtggtctacaggctgtcatggagatgcctctaaattaattgcatatcttggagtttgttcacagtataccaggctccaggtcccatgaactgatgtcagtagcttttaagaccaaattattttctgcctcagcacttttgaacattttatgcctcctccttgtaaatctttctgcctctgtttgcaaaggtcattctttatatccatcaggtgtcagttaaaattatactgttggagatctctatgaatactccattctttttgtcattccttttcttagaatcctgtttttcctgcttattcttacaacaatttgtaattttataggtagatagctagcaatcatttacttatttttgtttgacattcctattactttgtgtactctgtgaaggctgaactatgtctacttcattcattcattcattcattcatatatgctcagacccagtgcattttttttttgctatatagtagtgcttaatatattattcttgaatgaatcaatcatttgatcaatcaacaatgattttaggcaaatttacctctccccagcatattttcctctgagcataaatggctcactgaaattctggcctgtaaatagaaatgtatatttcctaagaagactgcgagtataccaatgatttgaaaaatgaacagaggttcttacatgactttaagaagataattccctttcaaaatgatgctttttccaaatctagtaacaggacaaagtaagatcattttgttgcttcactctttaacattttaattgtcaaagagcttggagaattctctttgaggtttagtgcacagcaaagtgtaataagaaaaagtattggtttcaggttacaattggtaaaagaaatattttaagatgtctttcagcaatcttagtgtttctctgtaatcataaatttgaaggtactgattttactatattggtagtaatcttaaagttaatactctagctgcatatctcagaatgatatacaaaacaaggatttccattttatttggaattataaaatgcttttacaaagcctgaatttgtccatagctcatgaatattccttttgtagtgttgttttgctattttagaattcagcaaaagaaacttgaattcagactacattctaagcatcaataagtatagcaatcctataacacaggcaaatataaatgcctgttctaaaaaagcttaaaaagaaaaaaaaaagtccttactgagtatataaaatattacgtttttactcatttaatcatcatccatgaggtgacaactattatctcaattttgccagtggggaaagagtcatacagaaaagtcccttgttcaaagtcacattggtagtaagtgactgtaaggatttgattgcaagtttcttaaacatcaaagttcaggttcttttcattgctgattgccttctgactttttgcatcatccagttctttttctttctctccccctacccttttccccattctccattccctttcccctaccaccttgagacaaccattctaatttacataatgtgtacatctggatttgtgtgtgttcttacatgcattttttatttacttgatgctagtttccacttttttgattaaacattctatttttcagctcacgttgttgtgtgagcatataatctatcacttctcattgctgcatgattctgtccattaatggaaaacctgttttcttctaaccttctaccatcataaattactctgcagctaaaaggcctatgtcacttatttttagtgcattatttttaggttataccgtatatatatatatataatatttatataatatatacttcttgtgcctaaagttctttacttcctccaagtcataaagatattttctcatggttttttcttatatctataggtttacatcttagatttagatttttattccacctttgtatctgctgttagcttagttccagttttattttgatatatagtatgagccagtatttataatacgatctattaaacaattaaatagtttaaatatttttgtattgtattcacaaaaaggaacttatttttaacttctatgtgtgtatatatatgcatatatacatgtatacacatatatacacatacatatatattttttgagatgggagtcttgccctgttacccaggcgggaccataggcatgtgtcaccatgcctggaaaatttttgtatttttagtagagatggggttccgccatgttggccaggctggtctcgaattcctgacctcagatgatccggccgccttggtctcccaaagtgctgggattacaggcatgagccaccgcacctggccaggttgcaccatagtatctaaagatttttctgtgtctttacaaccattttttttgccaatttaattggtgtaaatgatatttattgttgttttaatttatctgattactaattaagcatctctttgtttacctattagcattattagtttggcagtcttaaatatcacaaatatccttcttcattctgtaatctatgactttttttgcttattttttgctgcctttgctttaaaagttcttcacttcctccaagtcataaagatattttctcatggttttttcttatatctataggtttacatcttaagatttagatttttattccacctttgtatctgctgttagcttagttccagttttattttgataatatagtgtgagccagtatttataatatgatctattaaacaatgaaatagtttaaatatttttgtattgtattcacaaaaagaaacttatttttaacttctagagaaagaaaagtgactcttaatattataacgcctttcccataatagagtgtactggtattttttttaaaataagtgcaagtcatattttatgcctgttttgaatctgatcaaaaaaagtttttcctatttgtgtgagtctgtaaaggcacatttccttttgttttttctgctttagcctagagttctcgttggaactgacatgacataggattttacattgaatagttaaagaaaaaataactctttttccccccagcaattaatataccactatcgatataatgtgattttatcagtttaaatggaaaactgaaattaaagagaaattctctattaaagataatttattaaaattggtaaattatatgcatttgaataaaaaaaatcattaacagacttttatttcttttccaaatatgaagatgaaagtgtagatttcagatacatataaaatgcatgttttattatagcattatatgattttaatagaattattttccactaaatgatggttgcttaagaattttggaagaatggaatttttgaagtatgagctagaactgaagggaagatgaagagtccgaaatggttcctaattccattaggggaaaaagacttttcaatcagtcactcgagtgtccacagagaaacgtctgatgctatttcaggggataatctagtggaggaagatggcctcaattgaaatgcttagttgattatgtagttcattccagaataaataggctatttactttgtctgaaagttcaatagatttggatttcagtcaaatggaatggcattagatctttctttatgaatgttgatacaagtgtgtttagagaggacttctgtcagtttttattagtaatattcttattggttgagttttcttctccctcatttgctcagtgctccaattttgtggaggtcattttatttttgacgttatgacataggcaagtagaagcctctaagattttttttaaaaaaccctgttacaatgttttattcttataattttgtaactttcttaatcaaatgctgtggagacaaactgcaagaggaaaggttctttttaagggtacacacatgttggagatgaaattccttgagtttttgggagaaaataagaaacctgctgattctctgagctagaataatttatacttttctatgaacattagagaagtgatatactttaaggtgtgaggacaaaaacttgcaaaaaaacaacattgcatttgaattatagatggcatctaaatgataaaatgtataaaaatatccctaaaagataatttctttgtcataattgagaggggagcagtagcgtataggagagtttgccacacagaagatcaaatttcagctctgacatttcctactttgagaatctagctgaattacaattctaaacttttgtccttatcagtaaaatgtctatatctgacagtatacaaggggtatcttttgtgcctagcttaactgggccctcagctgtttatttttttaatttttccttctgtcctccatcaccattcccagattcttacattaaggacaactaagctaaacattactcataaggaagacaccttgtttgttttattaatagctagtttagcacataatacattttaaattgtctgcctatgactaatggcaaaaggtgtaagtccgtatttctttagagaagtaaaataattggcctttatttacagtgatcttgtaatctttgttcttttgtggtggttactaattatgtcagtgtcaaactaatcatattaagtaatggaggttaaattcccccagtgatttagaatacaagaatggaatattttggcattaaagaatgacttttcttttggaagtacatcgcgaagtctttgcaatatacatatttgtcaattaccatctgtgtaaagcaacagacagctgctcagtagcatttcctggagtggactggaaggatctttctcaccatatgactctgagacagttagagacccaccaaattgaagattacttgatgtaaattcacagcacatacctggttgatacagtttatattaacatgtttcttctaagaaacaataagctcttttttttcaataaggaaaatatttttatctgggaaaaactgtacaacatttatatagtgaatgatattcttttaaaataatttgttataagcctttcctaacagtgggatatgacaaactagaacatgtgcaatacaagtgatattttaagaagacactcagaaatgtaatccaacttcaatcgtggatgccccccagttttgtttgttttctatgtctggaattttcttgtcataaaattctaaattatttaaggtgaatatcctttgcaaaagatggtgtctaaattatgtctccagaaaagttagaaacctgcagtttcaggaatattttcattgagtacccatcaagtgccagaaaatatattagggacaaagaacatttctgtaaatagaacaggcaatgatatttgcccatctgttgggcttgtattttctctttgagtaaccactatgtgctaagtgaaatgtagtcaatttaaaatggtttataaaataataagaaaaaagtcatttataggtacaacattctttctaaggagtgcagaagctgaagttattgttttgctgagacctggagaggtttgcatattcaaaattgggggaagagctaattacttgtattgtagaagaagactttggaattcttgtggaggagattaggtggagagagagggtgggggtgtgagagagagtaagaaagaaaaagtgaagtacatgtgtttcccaaatgttgtgtttctgtacatctcaggcagggaacccattctccacccatctgaccacttctgccttatttacaaattttgatttgctggaaagggaattctactggcaaatgcacagtctgtttctcactgatacaccttggctgagtttctacctacagtctgacccttttgaacagaaagtgttaaggacttcccgttagggctcgtgcttaagcctcaggttgaacctacttgatccttaagaaaagcaaacaaagcaaaactctcaaacagaaagcactgtgtacttatttccttccataaaattttattgtgcactgtgttgcagggactttgctgagcttcacaaatttccttcatacaacttttactgcatgtaaaagagacccactccaaagttaaagtgatatgttgtcagaacatgaaatcaaaccagaagtaaaaatactggatatgtaaaaaatataacagccttctagtaaatatgcaaaaatcaaaatatgcaaaaaatcagtcttctagtaaatgcaaacatattggaaacatgatcattactgataactagaaatatttctaatagcagaaaataaacagaaaatggagaagacataatcaaagaaataataaaagaaaatatgacttaaatttacaatacaagtgccccaccacaatttaaaattttaaaaagacaagctgaaggcacatatttatgaaaattcataatactagagttaaagaaaaaaatttaaggtctttagaaataaaaattaagtcaaatcccggtgattagtactcaaaatgactttacactttccaacagtgatcctagaaattagaagaaattgcagcaatgtattcatattctgaaggaaaataactatctttcggtctgaattgtcatgattatataaaggttaagtaaataagttactccaactttcccaagttaattttttaaagaaacatagatcttgacttccagctaatacacaaagtttttaacctggaggaaactgctaactgagctgtgatggtaagtaaaatgtgtatttcttttcttttgggtacaatagctatatcattatacagcaaaggagagaaattgctacgcaggatttagtgatattttcaaggatagcatttaataggagaaatttctgcttgaggtgaagatctgtctggaaatttttgttagactaatttttttaaatgttaattatgatgctatactttttctgaatcagttcaaggagattaatagtcaaaaaagaaggtgtgcagacagttgcttaatgagatctgagaaggaaatttagaatcctatgttcttttcatcatcaacaggcattttacctaaaagtctagaaagacaccattgtgattttttttcctttgtcctgtaactctttcctatggcttggacagtgacaatagcattcgtgctgttcaactggcagggaacctaattatggctgttttatctgaagctcagataatttcagagctctttgaaaagattattaccttaatctaccagttaaattcttcagtgcacttatgagaaccatagcatcaactctgtagattgtaagagaaatctagaatttagaaagatgagggagtgagcaaaatgagcattgaattagatgtctggagacctaggttctggaactatttttgggtagttgacctcatctttttggagtgccattgcctaatcagaaaaataaggacgatggaataggtggtcttctgaatctaaattattttgttgaatttttttctctactttgaattctcaaaaatattttgctttagaagcgttctattagtatgtataatgatgtaaagcagcggtccacaaccattttggcaccagggatcatttttgtgggtaacaattttttcacaggccagggggtactgagagcgggggatggtttcgggataactcaagtgcattacaattattgattgactgattgattggagacagagtcttgctctgtcacccaggctggtgtgcagtggcttgatctcggctcactgcaactgccgcctcctgggttcaagcaattctcctgcttcagccacctgagtagctgggactacagatgcccaccaccatgcccggctaattttttgtatttttgtagagacggggtttcaccttgttgcccaggctggtctcaaactcctgagctcaatctgccctcctcagcctcccaaagtgccaggattacaggtgtgagccaccgcacccagccagtgcattacatttattgtgcactttatttatattatcattacattgtaacatacaatgaaataattatacaactcaacataatgtagaatcagtgggagccctgagcttgtgttcctgcaactagagggttccatctgtgggggatgggaggcagtgacagattatgaggcattagattcccatagggagagcataacctagatccctcgcatgtgtagttcacaatagggttctcactcctgtgagaatctcatgctgtggctcatctgacaggagacggagctcaggtggtaatgcaagcaatgggcagtggctgtaaatacagatgaagctttgctcactcaccagcagctcacctcctgctgtgcagcctgattcctaacaggccaaagaccaatacaggtccatggcccaagggttagggacccctgatgtaaaagacttatatatgttggtgaaaagagcagacacagaggaaattccacacacacatggatttaaatcttggatttattcttaggggcagtatcatctggaatggattattctgcctctctgagattcaccttctacaactataaaaagagaaacatggcacttagttttcaatatttttcaaaaattgctaatagtataagtacctgacataataaaaacattcaattaatagcaactgttatttgtgtgatgttttctaacttaagaactaggacatgaatttaaccacacaggaattctcatttttgagaagataaagaatgaggaaaatctgaaaaatattggaaatcattaataaaattctcctttgatcaaagatttatttcggcattccctaatttgccctgctcttgggtacgttagaatacatttatcctactttacactttgaaaaatttgtgcaaatgccatgattgtagcattagcctgattttttcccagtcttctggtttttttttttttttttttttttaactcaacatatattgtgaaacactcgggtatttattcctcaggaaagtatgacatatgaatgagagctagaggataagatcttgtgataataaatttttgaggttagtctctctgtgtccttgcagttttcgcatgtaactacttactctgtggagtctacacttatatgtaaaaggcagtttctgtgttagctggtttattttaaaaagaaaagacttggggcagtgaccatctcccttatctgaagacagtgatattagatcattcccagactggcctattttgctttcacatactgcaaaatgcttgatatgcctcatttttgtgctttagtaatcattcagactttgacatgcatttcttgagggtgttataacatgtttttgaattttctccaggaagcactctgatgatgtgatgaataatttagctggataactatttactagagaaaacacgaaggatgaaaaaatctaaacaaacttttttcactgagataaataatgagggcacctactcttttggcaaacggtataattactgctttcctggttaccagtgaaatctgggatatgctaatgctttggcataaacaactgaatataaatctcaataattgaagtttgaccaaaagaggggttaaatatgtctaagaggtcaaacacagagcagaaaaaaaagaatgggaaatgatcttagtctgaatcgcaagattgcatgttttgcttttactcaaaagagaaggaactggtatttagaaggagtttttttttcagagagtaaggcgttcagagtcactgggtctgagtgtgaatgctggcccacctgctatgtgaatggccttgagcaaggaaatacatctctcagcctggttttccacttctctaatataggatcacaccctctgccttggctacataagagaactgttataaggtatgctaaagttgcaactgagaaaacctgccgtaagctataaaggactaggaaatgtcagaaatgattgtaatgctgttggcccttcagctgcagtgccagctgcagaaattaaaaggaggctgaaaatttgatgttgcccttggaagtgaggggaaacattgttctcctcagcaaacctggtctaacatgtctgccaatccagtgaacgtatttcagcatgtgtcatgtgggatgcaccttatgaagggctgtctatacagatgttagggtatatcttagttaatttggcttataacaaagtgccatagagtgggtagctcataacaaataaatttatttttcacagttctggaagctgggaaatttgagaccaaggacccagcatgttcaggttcctgtgtgggctctcttctgggctgcagacggccaccttctcgcatgtcccctcttagaaagagaataagagagctcttgggggttccttttataaaggctctaattctgtttatatgaactattactgatgacgtaattacctcccagaagccccaccttcttatgccatccttttgggggttggaatttcaacatatgggtttggagagacacaaaccttcagtccattacagggtccaagttgcttcatgatccacaaactaccaaaatctaatacttgatacaaattcacccagaaaaacattagaatacagggatctgtcttgttctaaaatgggaatttattatgcttaaaccaaaccttatagtgaatccttgaaaattcagaccagagtctgaatgtacccctctagggtacttaccacttggatatttctagtaatttataatgagcattgagactgcccattcagatatattcatatacttctttaaataatcaaaacgtgttttctcttcccttctatttactgctgattttcattctacctaacttctctgcaaagatggtttaccttggtaactagcaataacaataataataatagtaatagtagtaatagcaaaggtatcatttacttaactccatcagaattttacatactcttatttctgattttattatttctttaccatgcaaatttgaacagaatcatctctgtccaatggcccatctttcttattactcatccactcttaactgcttgcaatgtataaccgtaaccctgctctaaaactactgacctaacaggcagcagggaattccttttattcagttcactagctctttcaaaattctaatctgctttgacttttcagtaccatttaactctctggaataatttctttgtttttgaaatcctctatactgtggcatgtcaatttatacctttgtgagagcttcttggtctcctctgtctactccctctgttcccagtccctgtgtgtaaattctgccctctccattcccactgtgactcctcagttttaggctgtcatcatttctcaccaagatgttgaactggctcctccgtgagagagcagagtggagaggtgaagcaagtgtctgcctgccttcctggtccatgacctctccctgcccttccatgctgggtgaccatctgcatgtaaagttggttttagctttcttattggtgaagtggggataataatagtatctattttttggatgaatgggaggggtcaatatgttactacgtgcaaaaatgcttaaaataattcctggcccttggtaagtgcaacataagtgctgccattactgtctttgttttaatattagttatgatcattatcattttaagtggtctccctgctgttggatcacttgcttccagtacattctgtacacagcagtcaaattattgtaaaacaaagcttagtttatgttactaagctgtttcatattcatatttgcattctatattgcctaacaattttaatcaggccctcaatagtcctggtttgtgtttcctggcttgtctgcaagtctcagtataatagtcagtactgatgtctcccttccccaccgtgctttccttactttctagaattgtgctttccttccacctccattaaaatcctacctgccattcacaagacccagaacaaatgctaccagacccttgatgccttttgtaatcctctatgatcaagcataagtctgtcctctctgaaactattaagtaaaggtctttattttaggtttctttttggccccatatctctgtatttggtattttatttatttatgtacatgttgttatcttttttcctagattataaactccttggggaagagcctttatatggccttccagctccctgcacaggacattacatccagtagacagatgttcaatgaagggctattgaattcatgtggatttccatgtgagaatagagctggatattcacttccctttttgctgtgcttgctaagcagactcatttgcaccggccactaccccagttggtcaccaggaatagagggtacttatggagattcttttcccaccccccaccatcttttaggatttagatgttgtttatacactgaaaagttcagcttttggctcatagtagcagatactgttggatatttgttgaatgaaaaagaaaataaatagtaaacatttgctgagtgagaaagaaaaaataaataatgaataaccacaccctgacccacttgtctgccagaagtgggaaaaagttgtaaataagcattttctggaggaaaaacacacaacccacacttgcttctgaatggtgtgggaaacatagattgagtctaaaattgagaggcatgcttatgtttactaagcacatggagaagcattatcagaacactactggcttttgcaatacattctttcgtcttttcaaaagtaactttttctatcacatttggcttaggttaagattcaaatcaatttacccttcacttgattcgtttttgtcagtgtggtaaccttatcagcaatgcagtttgcacccaaaaagatttgctgcagaaatgaatgaggccctctaagcccaatgtgaatataaactccacagcgatggtagaaatggtctcaggtgacccgtcagaataagaagtacttcctctccagaggtcctggcttgttatcccccagagccacacagtgaatgaagctaaactcctgttcttgaggtggaattatctcataacatttgacactttagtagtttataaagataacccaggaaataaaatttcaggagttgaaacaagtattcactgaagacaggacaactaaaatatgccacaaaaattgaggatcaatatatcaatatggaaggtttttaaaaatttttatttgtttaacttttatttttgtgcttggcttttcttgggatgtatttaggtatgaagacagtagaaataagatgtatacactttgggaggctgaggcaggtggatcgcctgaggtcaggagttggagaccagcctggccaacatagtgaaaccccatctctactaaaaatacaaaaaattatctgggcatggtggcaggcacctgtaattccagctacttgggaggctgaggcaggagaatcacttgaacacctgggaggcggagattgcaattagccaagatggagccattgcactccagcttgggcaacaagagcgaaactccgtctcaaaaaacagaatgacttctgctgagatatcaagaccacgttggtcttgacccctgcttccaggaagccttgcttgactgtctagggctgaattttataccattttaaaagaccctgctaattcctgtccttacatacatcacatagcagtgatcatttaattgtccagactccccatctacgtcacaagccacctgaaggcagatcacaactacatagctccttgcctggtgcctggctctagtctatatttaccggatgctgtattaaaagaggtaaaaccaaggcatgagtctgctgttgcagctcagaggcctcaatcagacagatgccaagctgcatttgatcggcagtcttgtatatttgactgacaacgttctggcttgcaagtatttaataacaacagaaagtgaattagtcaccaatacataaaaattgagagactttacacaaatctgaattcctgggctctcttgaaatacctgaaaatctgacgacgttggacgtacattgctacaaaaacctggagaagaatgtcatggctatgaatagtgaaagtattctccactctatcctattccccctggcacttaaagcttccttagttctcacctctaacaacccactgggcctataggaacttggagctgttccttctcttcctgggtgtctcattagagggatgaccccaagcttctcctccccctcttccctctgactcttcctcttgttaaaagagcatggatcttgcttcctaagaaggatcttatcctctaaagccattgtcctgctgagcgacaggaagctcctcatctacagtggccctgcaggtaccgagaaggcttttcatgcagctctgactccacatgggagtgatcacaatcaggattccctcacagactgcctggcttcagtgctgcactctcctgccttgagtcttgaactgcttcgtgatcctgaccacagtcttgtcacctgcttggcctgagaagcatgaaggtggtagatcctggtgccgctcctgaccacccagcagataacactttgattttttttctaagtagaaattgatcagtgtgggatttcgagattttcaaaggtgcctttgtttaaatcgagaattgggcaaggtagggatcttcgttaaaaagcaccatgtggtcaccggggttaatgaggcagatcagagcagcactgacactaaataaaggccaattaactccaatcactgcaggcctgggtgctttctggcagtgcaatctccctgtggggggcttcttgtcctgacaactctctggcagaggtaaggaggactggctccaaaagaaggcccctgagcaatggtgtggggtgagggcattgcccctccccaccacactgcccatcaggggcttatggcttttcttggaaggcatcgcccccacccagcctgccctgcatggtgctgtggacagagaagcaagactcagagactgaggccttctgtgggctcccaaccagctcaggggccaagcacagagattcagattctcaagaccccttttctctatccatttaattaattgccttgaagagaggatcacagagttcttgctgaaaaattatttaagtccatgaatgaagacaaatgatttcaacacaaacattgctcaattgggtacaaaaaatttttttcccttgtgtttgctttagtgataaaaatagccagtgctgatgatataaatttcacctcgtgccaagtgctgatctgaaacctttacctacattggctcagctggtcttcacaaattttctatgatatggatactattattaatcccatttatacatgggaaaacagaggcattggaaaagttcagttctatgctaggtactttccatgcctacttctatgtgattctcataaaaacctctgtgtggtgagtatttttagcactatattacaaatgaggacactgagattcagaaaacttgtgtgacatatctggtacagtattgctcctaatgatactaataaaatgaggatttggattcactttttttttctatttccaaagtatggtggtatagaatagctaactgcctaggctgaaggatttaaaatttttccttaagatttatctgtgagccctcagtttttctattcaaggtttctggattggagagtataatcagtaccaaaaactaataatgatcttaaaatagtgggtacagaataatgcctctggctccagcttgctccattgagtttcacacctggctgtattactttcttgcttctgacttctttcagccactaagccgtggatgttctcagtcctcagtcattaaagactagaacatcgcccaaagccaccttcgctactgcaactacagtcattagcataacagacctcagcatccacagaatcacttcatccaacaccccgatctctcattccctttgcctcctcatctccaaccaccttcttcgcttcgtctaagccacacatttcatcatcataccttggaatttcccaataccaacaactatatcagctctaatattccatgttaaaatgctccatttgtttatcaaacaccctctgttactatctggttagttcaaatacctcccatattctctgacctcacgaaactcccaatttcccccaacacttagctccctgggagcaccacttttctttcactcctgcttggatgccatgattccagcattagttgctctcttcctacttcaaacccacaagatgaaccttcctatcaaccttctccacattgacaaccaagaagttgtagacaatcacacaatgggggagcttggctgtattgtttatgacatacattcaggtcatctctaactgagctgtcagtcctgctcaacagtctcactaatttttctttcgagctcactctcccaccttttatgctaccttataaatagctcttctccaatccttccgtttcttttcattctcacttcaaacacaccagactcagccaccatcaccttactcaaaagcacaaatatttttctaatcagtcttcaattcagtcttgccactttgcctattcattcaccacacataagtcaaaataatgtgtttagatcctacattttatcatttgattcccctgctttaaaactttagtgtcattccatagctaataagataaaataaaaattcttacctcggttatcctacaagtattggttcatctggctgtgcctaaacctcaccattcttgcatacaataatccacccctttacattctaccttcatgatcttattttagtttcttgaacatgccaagcttctttccaattcaatgtattttgcatttgttacttatatacttgtctgtctctgaaaaacagctcccgttcattacccagctttcactatttcaagatctcaacttaaatatcacattcacagtttttcacgaagccccctctacccctgtctgttgtgagtcactgctcctgtcattcactcttccagtgctgggtgcttttcctttaaaggaccaaccatttttagaatatttacatatgtacttatatttttaaattctatcttggaaatcagattgtaagattaagaatggaaggttccagatatgctcacttactattataagccaggatctagtacagtgaaacttgagaaacatcttataaacatttaattcactttaacgtaaactagatttgataccttggacttggtgttaacctcccagaacctaatttcctgagtggcacaacaggggcacaatactcctgagaactatgatcaggttgcagtgtaataatgggtggaatccacactttggcaattctacagtgctttgccaactacaaagctgatgacctcagtgacagtgagcacacccagtgcccagagcttggtttgtaataccattcatcaattaaaacaacttggtttccttggagagatggatgattctagggttaaagcaagaaatatatatttacctatatgaacctggagcatcttatactgccagaaagcaaggaagtgctaaaaacaaaacaaatacacacacacacacacacacaaaacaaaaacaaaaaactcacactgattgttagatatcaaagggacacaggagccaacaaaagtatttcaaatggccaaagctgaaaaaatttgagcaacaaaataaataaagtagttttgtattataactgaaagtataagacaaatgttgatgagaccatgcagatataaataaataattgaataaatacaaaaatgagaaaaagagaccaatatgccatgcagaagaatttacgataatttatgtagatattcagtccttgaggtgttggctgtacatagtgaccttgtttctccttcctgaagagtacacagggaaagaaggaacaaggaataactaaatggtaggaaaatctgacaaacactaccccagcccggtaatcaaggtcaatactcacaatcataagtgatgctgatattatgtacctttgataggacatgatgaaaatggcactttacatctgtagtcttccttcctggaacccataaacccaatctaattgtgagaaaaacaccagacaaattcgaatcatgggccatcctataaaatacctgaaccagaactctttaaaaccatcaaggtcatcacagacaagcaaaatctgagaaattgacacagccaaggggaggctaaggaaacatgacaatggaataaaatgtggtctgctggaggggatcctggaacagaaaaggacatggggtaaaaatgaaggaagtctgaatagactgtggactttagttgataacttcctatcaatattctttcattcacagtgggaaatacaccatattaacgtaggaggtaatgcaattttatcttactttatggtggaaataatagaggaaactgggtgtggagtatgaggaaaacttctgtactgttttctcaatttttctgtaaatcttttttttttaaaaaacaaaaaacaaacaaacaaacaaaaaacacagagtcttgctctgtcgtccaggctggagtgcagtgtcatgatctcagctcactgcaacctctgcctcctgggttcaagcaattctcctgcctcagcctcccaagtagctgggattacaggcatgcatcaaccacacctggctaatttttgtatttttagtagagatggggttttaccatgtcatccagggtggtctcaaactcctgacctcaggtgatctgcctgcctcagcctcccaaactgctgggatcacatgcgtgagccaccacacctggtcaatttttcaataaatctgaaacttttcctttttttcttgagatggagtctcgctctgtcacccaggctggagttcagtggtgcaatctcgtctcactgcaacctccatctcctgggttcaagtgattcttctgcctcagcctcccaagtagctgggactataggcacacgccactgtgcctggctaatttttgtatttctagtagagatggggtttcaccatattggccaggctggtctcgaactcctgacctcgtgatccacctgcctcggcctcctaaagtgctgggattacaggcgtgagccactgtgcctggcttaaatctgaaacttttctaaacatgaaatctactttaaaaatactgtgcatcatcatcatcatccacttgctgtggtctaaaaatactcagatgtatctaccttctttcccccaaatcgatgcctttgttgttgctttcaatgtacgttattttgaatgctttgtatactgtagagtgctccacaaagtcaggaagctctttttcttgtatggctcactgccctcttcaggtgtcacgctggatgttctcaagttatctctggtcttgtcaggctttactcctccttcctgtcctgaggcacaggcttgcactccctctttctctacctctgtgtttgctcacactcttgctctctatcctgctgctctaccttctctttctgttcttgtgggataactatgggaataaaattcagatttattttcctaattctcttctgaaaattttgaactggggaatattgatgtcttctatttctatcttctaactttacaaaataaggatattctccagattcacaaggaatgtgtatgagcactaagagaatgcatttggaaccctttaggcaatggaagaggaaggaccagaaattcagcaaaatcaatagctgagttcttacagagaaagagaggcagggaacattatgtctctatctatgatgagaggcatgtttttctactctctaggaaatgacttcctgcaaatgatggccagataaatcagaggtcatggtccgtggaattgctatttttctcagttgacaatgtgtagacgacagggtttataaccagtactacttctcatgccatttgctctgattttataacagcgacttcagctccaattgtggacctgattgcaagatagtcttaaattctcaaaaggagctagaaccctggaatgtatgtaaattttttaaatttatttttaaaacctgaatgccaaaaagtatttgaatgaaagagtcaatcagtccaaaaacaattgcgtacctctctggaaggtctagtgaaagggaaagagaagagagaaggaagaaaggagaatggggaaaaaaaacttttcttccttttacatatccagctgtaatgagttcagaatgcaatattgtgccagtgggttacagtgtgtttcataaaaggccttcaattcatgttagttgagtgaataaataaagagatacattgaaaacaattttaaggtcttttgtaggagtgattagcaaacatttataaatacaaaaaaaaaagttattaagaattctaggccgagcgtggtggctcatgcctgtaatcccagcactttgggaggctgaggcaggtgaatcacctgaggtcaggagttccagaccagcctggccaacatggtgaaaccccatctgtagagatatacgaaaattagccatgtggtggtgggcgcctgtaatcccagctactcaggagcatgaggtggtaggattgcttgaacctgggagacgaaggttgcagtgagccaagatcacaccattgccctttagcctatgtgacagagcaagattttgtctcaaaaaaagaaaaaaaaattctgatttttcctatgatgtctatctaacaaaataaaatcaccatattttcttgcactttgccctgaaaagcatagtattaatatggaatgaattggagttaggtaaatctaagtttaaattctacccctattacctgctaactacagggccttacatgagtggataactctctcctccttggtgtctgcatcttgcataagtctctggctaaactcatcaattaccagatactccccatttatttcccagatagtgcctaacacacatcctttaacagagagcaaggttttgtagtcatctctctttgtaaccgctttgttatttaatagttgtccagatgcagcagtgctgtaggtgctgtacgagaataaaatgcatcagttaaaaattattccaacctagtttattgacattctcaattatattggtcatgaatggaacgttcctagggaatagatggtgataatagttgtgctcaattatggccttatcatttttaggtgtcctctgttttctatgactcataattaggactcaacatttttatatttgatcattttatttttcttattagagtccattattctcctgtgaagttttgccagagatatggcatacaaattggatttgtgtatgctgtatactaagtagacatttgaggaatgaaaaatatgaattcacaaattaggcaggcatccttgttgtatctatcatatggattttcatgacacagactaaataacaatcattgcacaaaggccgtagtgcagcagggcaaatggtggagttacttgtttgatattaattcagtgctttgcccaataatgcaaaattgtcctaatgttacatttgaggaaaaagacacatcgagtgccagcattcaaacaggcagtgtgttaaggatatgtttataggttgccttatcaaacagttacaacaaaccaagagaggagttgtctgtccttcaaagtttagatgaggaatgtgaaggttggaggtgtgaaatgccagtcttatggccacatagctcccttgtgatagatccaggatttaatgctgggtatatttcacatcaaccataacataggtcttccactttgagaaagatacgtatttaattttacttggaactcgggaaattagaaacaaaagcagctgtggattgaaagataggaattgtgcagattgggcctgaaactgatatccccaggaaactaattgtgaaatggaagatgaaagttgggtgctgggtgtgacagtctctgggattattccagagctcagacctattctgtggccttatggaattaatgcaaccccatatgaaagggagcttttcagtcaccatgggttaatttcagacaaataaaacatctgccattgatcgaaaatctgaatgttcaattttacagaagttgttatctttttcacttcagttcactttccatttaaaactgaaaatcaatccttctcagggcctttgtgtgtttttggagatgcacactacaatttcctgccaaaatacttgtcaaatgttagcatacatttgacaagtagtccttgggccagagtcattaagataaaaaatcctggtttactcaatctaggaagacccagcgcacctgacaccaagtctgtgcagagtaaccttgaattcaggatgtttatgaaaattccagcacctacactcctctttattaattataaattagatggcacaccgtagtaatcatcttgttaaacacagccataggcaaacttagaaaaagaaatattaagtaaaaagtagtataataaaatggcagcagaacaactaggatggagtttgcaaacactgaccactccgtaacaatgaattaggctgggtgtggtggctcatgcctgtaatcccagagctttgaaaggcagaggtggaaggattgcatcagccccggagtttgagaccagcctgagctacatagtgagaccttatgtctacaagaattgtttaaaaatattatccaggcatggtgctgcacacctatagtcccaactactcaggaggctgagcggggaggatcacttgaggacaggagtttgaagttaccatgagatataattacacctttgcactccaacctgggtgacagggcaagaccttgtctctattaaaaaaacaaaacaaaactgataaacaaataaataaatagataaaaataaataaatgttattcaggctgcagccaagtatttcctgttgctacaatgccatactttctattccctgtcccacaaaatacgcattcatttctaaggctgaaaagttgcctagacagggttggttcataaatggattgctctttcagtcataacaaaaagcgatacatcttcatagtcaggctaaagggcttagtaattcaccttatctgtgtatctcctaaagaaattagcaaaatcactgagtttggcgtttgtacttggtgccctggctttggtggaacctataatagtggtacaaataacacatgggagacgtttataatgccaaagcagctagagttgtaagtgcagcattataggagtagagtcatgtctttcttggagcatcaggaagggattcttagaagtgacatgtgccctggattaagtagaggcctgaggcatcatattccttcaactttccaggaaatctcaattatatctggaattagatgctgggaaataacatgacaatgacaggttgggtaaagacaatgaatgggtcaccaagaggtttgccatttatcttttaagccatggcatttgcagtgggaatatgtcaggatcagatttctggtttgagatcgctagagaagcagagtgagaatggactggagtggtagtgactggtgacagagagaccattttagtcttctccatttcactgagtaaaattagggagatagtaaatctattaaaaaggtagtctaagctgagctggggaaacatgacccccccatacaggcaggacacaataaatgactaataaaacagtatacatttaggtgctacatgatgttgtacagccttcatgtggtaaaggagttctgtgaagcaagtgagcagagaggtctggagttgataggcttggaaatttgtttcctcaaaatctcatgttgaaatgtaatcaccaatgctgtgagtggggcctggtgggaggtatttggatcatggggcaggttgctcatgaatggcttaataccatccccttggtgatgagtgagttctctctcttgcagttcacatgagatctagttgtttaaaagagctagagactgatatggtttggctgtgtccccacccaaaatctcaccttgaaatgcaaaccccataatcctcataatccccacatgtcaagggagaaaccagctggaggtaattgaatcatgggggtggtttcctccatgctgttctcctgaattagttctcatgagatctgatggttttataaggggcgccacccgcttcactcattcactctcctgtctcctgccaccatatgaagaaggtcagtgcctgcttccccttctgccatgattgtaagtttcctgaggcctccccagccatgtggaactgagagtcaattaaacctctttcctttataaattacccagtgttgggtatttctttatagcagtgtgaaaatggactaattgccgagaccagctgggtcgtggagaccttaacccagcggcgctagaggaattaaagacacacacacagaaatatagagtgtggagtgggatcaggggactgacagccttcagagctgagagccccaaagagagatttacccacatatttattgacagcaagccagtgataagcattgattctatagattatagattaactaaaagtattccttatgggaaacagggatgggctgaaacaaagggatgggctctggctagttatctgcagcgggaacatgtccttaaggcacagatcactcatgctatttttttgtggtttaggaacgcctttaagcagttttccgccctgggtgggccaggtgttccttgccctcattccagtaaatccacaaccttcagcgtgggcatcatggccatcacgaacatgtcacggtgctgctgagattttgtttatgaccagttttggggccagattgggggcctgtgcctgacactaaacagagacctcccccttctttctcttactcctgctctcaccatgtgatgcacctgctccccctttgccttccaccataattggaagcttcctgaggccttcaccaggagcaaatgctggagccatgattggaaagcctgcagaaccatgagcgaactaaacctcttttatttattacttacccagccttaggtatttcttcatagctatgcaagaatggactaatacagtagtcatcaaagtaaaggtgagatttgagttgactattgaaaggggaggaaggaataacataaattgtgtcacagacaaggattggttggtaggacacggagtagtgacaatcctgacatgcccatgttttatgcttcgatttgggaccttaaagtattcagccctactctagcaaaaatggccgcatacaggaaaaagagatcattctgtttgacattttgtatctagagagatttagctctgttgcttgttttactgacttgtaagtacactcattttgttctcacagtattttcttagcttttacattctggctactcctatttccacctgaacaaatgagaaatttagttgctaccaatgtctagccttagtactgctctgttctcagggttcagtgtttccttcaaacaatgtgttaggtaataatcaggtctgatacatgcagcatctgtgaactccttacttgatgctgtttgtttttaataaatatggtgtcacaggtcataggtggggatattttaataagtgacactaggatggagtacttactgactgctaggcgcagtgtgccttctatatgtgatctgctttttcccttttacgaacacgatgaggagggtgtttgaattgccatttttgtatatgtaaatagaggctcagagagttaaaaagcttgtccaaagtattcacctaggactgtgctgattaagaatcttagcactaacctaatttttatctggaatgctggatacaattgaaagtttatagttgaggataggaaggaccaaagattggagtcttatcccagatcattaacaccagttaggtcatgcatccttccttacctgctttgtataaaaaataaaataaaatttaaaagtgacactagaacaacgtttgtcttgttaatgtctgtaagatggtttccaaaacgatgagtctggggacttaataaagcaatttagaagcttttgcagtagcagtaacaggaggtgggtgtacatcagtgggaaagaaagatgtggatggctgagggaagaaaataaagaaaaacggatacaagatagagatgattgaattaggcttgaattactcaagggatgggcaagagaaggtagacaaggctgagatttttgcctctaaatccacaaagttcatgcactctgaatgagatttggagcattttaaaaccttttaagttttctattgaacatttttatcctccaaatcattttcttccagtgtgctaagattatagcctttagctaatggttttctctctcagttatgctcctaccatttataagcattaattttgctgaactgatatagtaaaaatgttcaaaataacatttggcagagcattttactctgactactcaagaataacctataatcttttctttttatactacatacacacacaccacacacacacactcatatacacacttacacctgtttttccaggatttacgtctttacctaaaattgtataaatttttccatagtcgagatgtataatttaaccttccctttcccaagggatgacatgtagccatttatttcaataagaaactccaagagcactagtattcacaagccaaatacagataacaccaaaatttttgctaaataaaggtgatgcatccattagcaaatgttgttgcttttaaagtgatggtttatatttaaaatccagtttaagttaaagttaggatatactgatggtttgcacatgatgagtggcagaataaatgagtcaaagttaactcagaggggctttgtttatttttttgttgttgttattttgcttttcctgggcatgtgggtaaatcatctccccagatgtgatgactgatgcttactgggcaacgaagagaaaatgtcacataggcattggatatgtgagtctggaactcaggggagaaataggggctggagttaaaaaacgtagagcctttgtattagttcgttctcacattgctaataaagacatacctgagactgggtaatttataaagtaaagaggtttaatggactcacagttccacattgctggggggcctcaggaaatttacaatcatggccgaaggcacccttcacagggtggcaggagaaagaatgagtgctgagcaagggggaaaccccttataaaaccattaggtctcagaactcactagtgatcatgagaacagcccgggggaaactgcgacccccactcccgccccgcccgattcaattatctccacccggtcctgcccttgacacatggggattattacaattgaaggtgagatttgggtggggacacagagccaaaccatataatccttgttgtggaaatgttatttaaacccacagactggataagctcaccaaaggcgtatgtgtacatggagtaaagggaagaatgactgaactttgaggcacatcatctttaaaagtcgggaaaaggaagatttaacaatgttgccaatgaaggagcagggaaagaagccacaggcagggagagaaatcagaaaatgaggacatcctaatggccaaggcgggaaaatatttcaagaatggagggatcaatcatgacaagtgccactgagaggtcaggtaaaatgagaactgagaattgcctgttggacacttaaggagaatgactttgagctttgtgaaataaaagcctgcctggaatgggtacaaaagagagaagggagggaagtgagccagtgagtacaaacaagtcttgcctttcacttgatcaggaggcaagatagcatattctgctacagatgaagtgaagtgggttgacttggtggtagaaggctaaggaagttctctcagcaagttaactaggtgagaatgaggggtgtgtgtgtatgtagtgccagagatgtggggagagaataaaaggtgtgagaaagtcacccttgataataagatagtaaattaaccaccaaaattggggccgccagtgccaagaactcacttgagggctctaattataaatttatagtaagaccagtcagcagagtcattcgtttttatctgcatcatgatacatgtaaggaggtgacagagatctgctgaaacccaacttgggattttgacaatggaaggacagaagtgtggggatgttcaactggatttatgtaaggtattataatgatgggaaatgaaatctaaatcagctaagaaagaaaatgagagcacgaggaaggttatggacgatggcactgtaatgtattatagtcaatggattggagatcccaagaggtcaagaaacaactaaagtgacagtgaatatactagggtaagaaagcttgaaagttacaaggtagtaaagtgtctgaaattgttatttttggatgtggcgtaataatagataacgatgagttctgaagtatgattaattaaggtaaaatataggacatgaacattggagaatggctggttaacaaactgagaaaccattttcatggttggaccatctacatgcttactgacatcaccaacaattatggcagtagccttatgttaaaatcaatgccagatgccaatatcatcagaggatggtggtggggaggctatcagaagactgtaaatgatggaaaccagaagcattcattgatagtgaagttttgcattttagggtatgaagaagaaaagaaggaaaatgtcttggaagtaacaattcggagcatgaattgtccctatacaaactccaagacttgtggcatgtggagaattaaaggaatagagaacaaaattcatcctttaatagggcttcagagaaaagttcttaggcgccaattgattttctcttcaagaagggaaggacatattcagagatgagattttcatgatggcatgccttgagtgccagagggtttggggagtatagaagatgtaggagcttgagtcccactaagggatcttcaaaatagtgtatgcttatgggaccaatgaatacagttcatctggaacacttgtgttccctgccgggattgataaaatacagggtctaatgggattgagcctattggtctcagttatggtggttcaaggggcagtcggggagggtgtgttctattataatcccattggagtaatggtcttagtccattttgaaaggtaaagcggagttggagaatgcgggtggttagtgatcacctggacatgtggagctcgtaagtaatatgggggctacagcgtgcagagtccagtgggcctacatttgaccttcctgtgagcagtactgaaggctggggaagacaagcctcaataacttgtcagactgagtcaggactgagattctcaacagtaatcagctaagaggtattgctctcctatcctaagagatgccttctttggcaagactgttcaactatgtctcattactaaaggtagacagaatcacttgggagaatccaggatgtggtactgttttgacacggtccaagctggatgatgtaagcaggagagaatgttctaccaaaaaccttgcaacatcagatcttcagctgtgcagccagtcagcacacagaagctaagctaaagagatgtggcatccccacagggaaagagaaagaagcattaggtaagcaactgcctcatttcccagcagtcatgaaggcagttttgctaagccatctcatagcaggttatggatcctgaatttctatgtattcccttagcccagaatcctgctttgcttttatgaacttaccacaaatgatgctcctgttctagagtctaggggagtgattccaaagtctggctgcagagtagaatcacctggaatgtccaaaataaaaatccagattctacccctgaacaattaagtcagaatctgtggggtcctggcttcagtgtttttcaaaagtttcctagatgattcttatatagagccgtggttaagagctatattctagggctcagattctgtccaactcctttggtttgacaagcaggttggctgctgctagaggactaacacttagctcctttctaggactttgcattttttttcaatgattcatagtcctcagactgactatcacatgcatacacgcatacacaaaactgtcctgctgtggtacaaaatgtgtgccttattgagtctcaatccagggacaattgcagcaagtgaagtttccagaggcctgggtatccataacacacacaggcatcccatccttgcagacagttcacacatggatgtgtgatccagtggcaggtctcaagaaaggaaagcttccaaagccaggagcttgactgagacagagccttgaggtcttggactggatctcccttccaggtacacactagaggcaggcagcttccttgtttcttcctctgctctggctgctgtttcattctaagcctctgcagacacattcttcatagctgagaaaactcacagatggaatgactattattggtgcttgtcaatccagaaataaaccacaatttgctcggcatttcaatctttaccactgatgtgttagtttcatttaattagttctgtgctggatgaggtcattagatttgcgtcctaatggaaacctattactcagctctgcatggtgaggagtgtgtaggactgatttgcattatctctggaaagaaggtgaattctctcactacatttgtggtgggcagcaggtcttccagcagaaacccatttgagataacactaattgaagggacacctgtcttttgagaattcttttaaaattttcatagcagattggctgtatgccctgagaaaagggtaaaaagtgtgctacttataaaacgcaattttggagaaaagatgtagtatgatagctaaaactgttacatgaatatcactgagtattttttaagctcttcctcttagaaccaaatttgaacaaattcttcccacacgttcttctagagttcacaaaatggaaagtggaaagtagaaatgaaaccacacctgtttccctcctggagtgagccctcattgaatctctgtagtagtgcctataagagtgcttttattttacaggggtactattatcattttcctttttcagaggagaaaactgaggcttcacactgtgagacctgaggcttcaagttactgaatattttgctcaagtcattgcttgtatcaaatggaacagatggaccccaaacccagtgtggctggtctgaaactttcctctttgtttttatactgcatcaaaaacagtttttcttgccctgatagaatctatgccacttaattctcaaaaccctgtcttcatcacatcccaccattctgaaatattcaccttcccttacaagataccaccatttgaaaatcgcaaaatatttttaaatctatcctctttcttatatattttttatcaagattccttctctggattctggccgtattatgaaaacagcaggtccaagtgtcattgggccaatgtaaaattgtgttgctgtattaagacatggacctaatgatcctggaaagctgagtgggtttagttatgttttgttttctttcctgtctaggacatcatgcaaagctagactacaagaaccagggattgatttcagtgtttctctgggggatggggtaatgggggatagatggtaagtctataatcaagaccatctctaaggaagaggattgatactctttccacgggtgacactgcattattttccatgtaaatggtgccccaagagtactatgggcagtcttgttgcagatctatttcatcttcctttcccctgccctcacctccctgctatttattgtttcccttcactgtcaaattctctgaaacattgtctgtattcaccgtgactcctttgcaatgcactttcactgcaatcctttaaaaaagtttgtcttcctcctacatttttctgataccactttctctgagaaattcaatgtataaatctaccagctcaggaatcccttcttaatttttctctgagactagtcactattttatccactctttctagaagttcacttctttctttatttttcagtttcactttagcctctaataggaggtggttgtctaagggccttgaggaggctgagcttgcacagtgatagttaattcttgttagtggctctccctctctagttcagcatatgctttcttttcctttctcataagtggaaacagtcataatgttctgctgttggatgtttcctggaaaagtctttggagagtttctcttcttctaagatttcagctaatgcactatgtggtatacagcttatctgtatctccagcctccacctctctcaagctctggccttccattggtcactcagtactcactgatcatctccatctagaaagccctgtggtaacccagagtcagccgaaatgaagacaagctcttcatctctctaaatatatttttgactctttatctgtagtctactaacttcatcatctatgcactagatagtagattgaaccagctgtaaactatgtctactagttttgtgcagtggttctcaaacttcagcgggatcaagaccactgtcatgatagcacacattgctaggtcccccttgagaagtttctgcttcagaaggtctggggtgaatcctgacaatttcatttctaacaaggtcccaggtaatgctgatgctgctggtccaaggaccacactttgaaagacacggatttcctgcacaagtctggagccagattgagttaggcttaaatcctaactcagccatgtgcttcatgtatgaatcttggcaaacttacatgaagtctctctgattcctcttctgtaaaatggggacgattaaagtatctacctcatagattttcttgtaaaaacgacatgagtatataagcaaagtgcttccaacagtttttggcagaccctcaaaaactgttagctataattgcacagcgtttactctctctgctttccttgtcctcactcccaacaaccaatcagctctcatgtcctaacagtctgcactctggaatacatccatttccttttcattattgctgtggatgggattaagtgtgtaatcacattgtcattcccctcactctactcatggtcatttaactgattggaactgtcactctctatccctgcttccccagacctcatactgttgtcaggttctaccttaatcactttaaagcaatcattacaaataggtcccttccttgcttagaaagtgaatgttgagtatattaatagggtatttgggactttccttgtactgagggcacctgggctgtctatgcatttcctctcatagcattcatgatatggaatctatgtttttgtaaatgtacctctttgctttcctgcttctgtaattttttacattatattcatttcttttgatatatactccccttcactattacaaggcagagtcttaattcattcttcaaggcctggtcaactttcctttgcccttccgaaggtatagcaaaatggtttcattcctcatgagaatgctgactgattgatggtagctgcttagagagatgacaagaattctggggccacatctacctgtgttcaatcacaaataatatcatggccagtgagcagtatctactgtagacacaggttaaatgcatggatgcatctgtaacaagtattgtctcttacgccatggagtacattttatactgtggatgcccaatgcattttggaaatctcacaactcagtaggcataacctgaattgtcaatgtgagtttcattttgattatgatagctaattttcccttcttcattccaggatgagggtgagaccttatctcagagaatgatattgccagccagaaaatcataataggcaatgaaaataagcctttaccaccttagttcgagaaagcaatatttggaacagggaaaatatattggttgtattggtggctacaggcttaggggtgaggtcttgggttttgaggtatagggaaccagaagaaagaataaggggatattctcccacaaggataaagaaaatcagagggttcttgggaatagctatttatagaggacttccatcatggagaactcctgattttacatgtgcaaggtagaaaagtgataaattccagctctgccacctatgagctatgtaattgggcaggtagttaactttttttgagcttcaacactattatcttaaaaacagaaatcatgatgctacctatcagggcgattgcaaaaattaaaggaaaacatatataaaacactttgtataatatctgactcaataattggttgttgttcttatgaatgttgtatggaataacaatcaagaaaatccccttaaaggtgttaaaactctttgcctcttatcccatattcctatattcaccgttagttatacacacataatgtcatgaagtgtctaaacaatactacaactactaactaattaactctaattgattggaactgtgtaagcaatactgctggtttactgttttcctgcaccaactagcatgagttgatgctgtgaaggtagagttttggtgctgctgtcatatttaatgcattcaaatttaaaagagaaacagcatgaatattacttagaaattcatacctttctaaggaagtttactctcttagattatcacactttataccttagatattttggcttatcttgttcttttcctgatgatgttattaaataccttgaaacacatgggttcataaatattgtaatttattcgttcaacaaatatttttggatgtttcatggggccaaggttctattctagatatcagagacataactgtgtacaaaacatataaacctactattctactggagattatcttctggagatagaatttagacactcaacaagtgagcaaacaaacaaccatgctgcaattttagatgttgacattttctctaaagaaaataagatgatggagtagagatgaccatggtagggtttgggtaatcatttttgaattgtggcgagagctttggccacatttgaattgatacctgcatgatgataaaggatgaagcaagaaaaaaatgtgaattctgagtcctctaagcagcgagaaaagcaagtgatccaactggcataaggactgaaagaagggccagttggtagctaccaggagtttggaaaggagtgttaaaaatcagtgctggaggggctggctgcgctgatcctggagggtgctggaagtcacctagggagtttggaattgcttgggtgcaagagaagccagtgaaacataaagatggtagcaagaaaaataaatttgattttccaagtgtacatgaacactgaatgcctgtagatctaaccttataaagaatttggtggctatttatgtagatgaagtggatactcacctgtgatttgttttctagattcaaattttctcccattgaaaaagcacagggtttacgcctttctactttgttgttcctgaattcaaaaacttttgagttcgtttttaatatattccatgacatattcatgtcatcctgttctctgacaataattttcagtgtggccctgatctgctacattatttatttctttctctttcccaaagctatcttgtgtcctctttgtatttctgtcttttatggacctgagaagatattaacgtagagattttgataaattgcctctgctgtccttggattacttcactttcctttagaaggctcgctatggccttaaaactgtgggcctgtttaaggttattaattcgttccagttcttggggagagcagcatgagcctctgcatgtatcatctggttgaatattctaacaatttaacaattgtcttttcgtctcttgtcccccacactttcaagttggggttgtcttttaacttcactcatagacttggacattcccttccatttcaaatagatgtttccaactcttgtgttatttctcttcttttattatatttgctgtatctacatattttttcaagagctgtacattactcttgactgttctaaattggcatgcctttatgttgacctcctgatcttcacctgtatacattatttgtcccaaggctttgattggctgcttagtcacattgagcacattcgctgaagctctaaagactcttctgtagagtcgacaactgtgtcagttctgtgtatctagtgccagaaaagtacaagggtgatgttttattcatactttgtgctttccttcacaatgacttgttaatttatttttaagttttcttaaatagttacattatttttatatgattcaagattttgaaaacattttttaaaatttaaaatggatatgattgaatttaattataacccacagaattttaatgggccatttgaaattgcaataattgaagaaaatgtttcaaaaatattttgagtgagcttttgaagtctctaacatacagtatatataatatccattttaaaaaattttcttaatgtgttgataatatgtggtttcttttacgaaaatactgtttttcatataaattcctagggagaactttgaaagaataatagtgattaaggaaagcatttaaataagaattaacccaaaagtagaagaaaatcagttaataaaaaacctagtcagagaaaaaatgccacaagttgtttttttcttctttgaaagaactttgatgatattctttcatttccccagccccagaaagaacaaagcttgtaggcgatgactgtgagccagacgaatcttgaaactctttgctcattcctcccaagtatcattcacctacaaatacataacttaattctatgcttctatttggaagagggaagctttaaaattattgcaaacgttcttgcaacggatccagttgcgcctgcctcattttccacctcctacgatgattatgatttcagagtggatttcagaggagaaagaatacatttctcagaaatgtcacttttattttaaaattaaaaaaatcatttctagatgttgcaattaatataaaataacccttcaagaatcataaaaagagaacactgacaaattttctgcaaatgaatgtgaaaaaattttagcatagcaaaatatggtggcagagtgtctacaaagttttcttcccatgctcatagaaacttcactgaaaattcaagactggctggaagattgagtgaactaaaaacctgcaaccttcttctaattctgaattctcatattaaaagaagaattagttgtcagatctagaatgattattagcctttattgctgctttcttcttaaaattttcacagtaagtagtttatttctgaataaaaatgaatgaaaattgctataatctattgtgtttggttattttatgaacaataatatgaatatgatgagaagtgtaagttacaaaaagagaccaagtcaaaatttaagaaacatttcattcataccatttatttagaaacactttctaattaattgaacactttattttaaagcccttggtgctgttagggaactgtaaccaagtccaaactggtaattagtaaaaatattaaaaactaaaattttaaattatttctcaagtggattcattttgttgtccctatgtttttgcatactatagtggtatttcatagggttatttcatcgtcccattaaaactatgctgcagtttccattcattacctcacttgatcagacaagacagaataaacctcttgcccaaagcacccaactagaaagggtgggagctgcccaattccaaacttcatgccttccacttagactagactctgcttcctctctctgaactcagttttcttggactgctagccttttccttttgtggaatattttctctgcctccatctagagtgtcatatgtagtttcctatatggtgaaaaataaaataattcaaaaaatgaaaggaaggttttaaagctccaatacagctttgaatccaataacctaacaatgaatataaacttttctatgatttaaaaagtatacttgtacatctattctttagattatcaatgttgtttagtgtaggtaatgcagatgctcagtctaccatcttgaattagaagcaacttatttattgcttaccagaatctttcctgagttgccaagagcatagagttaggaaattttgtaaacgtttaccttggacagtatctccttaggctgaaattacagtaggtggacagtaacaatatgatctttattttagttctttgatattggaatatgaattttctagaagggtcaaggcacttacatgacctaaaaaattagactctatttgttaataagagtctaacttatttcaaagcaaaaggccagtgaaggatcctcagggctggattaatgtgattttcagcacagagtgatgatggcaattatggtttccaaagcctgggagctgtgtgttttcagatgttggagagggaattgtttggaattcccaattccaaatgatttccctattgtttggagccagtagaaatactgactcttgtcagtatatttatttacaaagctcttgatgtatgcccactttaaagaattaactttcaaaaatcttaaagatataattggagtaagtttgttatatatgaagaaaaaataattctaagagttagaatataaaatgtgcagaatgtaactgtgcttttactttaagtttaggaggaaaacctaaacataacacattcttccaatgatattatgaatcatgtatgtcctgtcaaagaaaatgatcacttaatatgtgatattattaatgctttaatatgcaaatattctgcaaatgtcagtaactgaaggaaggagataaaatagtccttcaaaagttgaacatactcatacatactgtgcataggacacaattttaaataagattacgacctattcatttaatgacaacaataagttcgttttattcatcaataattcattttccaaagtacatatcatggctaaatattatttgaacataatggatacacacgagtaattgtcctgaattcctatataaatctattaacacaaagtagtaatgtaaacagtaaatacactacaaatacctgttcaagaatggccacactcttttaaaatattcatatattttgcatttagtttaaatgaaatctcattctacaaaatttgaataaactggctctaaaatgtacttcttattctcaattagaaatatagttcatgaaaagtgatttgtaaaaactgaaggaaaaggaatttttgtgttttcataagttattgtataattggctgacatgtttataaatccctttctccaggaagatgtaaaggaactcaacagaccaggttaacctgattcttctttgcattgtcacaaagaaatgaaacacagaattaaataaaataatgcaaccaatgttttaaatttttgcagtaaagaggtcaaaggagctcatctttaaatagaaataagcaccatagttttattctaactgcatagataacaatatataacttgtagaacataattttatgagttggtttggtggacaaatgtgtaattcttcttatgtggtcttatgtgggaccattcaggacaaaaaatgacatactgatctttatatttgcaatgcttaccatgtaatacacactcaaaatactttttaattgaacttcgtgtgtgtatagcacagaaaacttatcaaaccttaaaatgtagcagttaaaaaagatagtacatttccttccttagcattaggttaaattttaaactgttttaatttcctgaagtgtcttataaacttttagaattacaaaaaaatgtggtttttaataaaatatttttctccctcattattgaagacgatgttaccatacaactgagatggtttaaacttcagatgctccatagcagatatttgttttttactttctttcatgtcaggctgcttctttcaaattggtcattactagacattttcattgcaataatatttattatttttatgtcttttgaagcctttaacccagaaaggcctctaagtacgttttggatcataaaataaatggaaaaatctttaatcttaaataatcattagtttagcaaatatttctgttgatggttttcactggaacagagcttgctgatatgattgtaagtgtaggataaggccacccagttcagataattctcttccagagtaggacttctaagttggaaaacaataaagactataaggttgtttaaaaccatgcttattttacttatagataattcaggcattgacatatgtattatgtcatttgcaaatgatcattaagaatctctacttgggggatagataataataatcatatctttctcaataagggaatatggtaaaattccagatttagtagtggctaatgtaacctccttttcatggctctattcatgcctcattcctttcctatcatcctccatctaggtcactagcccttgttggagaatattgtatcctattgctccgtgctggtctgcttacctcatggccttaatattgttatgaccttgcaggaagctctcagtattctgtctaaagttgctcaaataatgtttaaatgtgcaatgtttatgctttagctggattccagccacagtgagtaacaagatccacatttttttcttcaccagaattccaggaagtggcatagtatccctctgagggaagcagtgagaaaaatggattggtctaccctcctcagcctttggagagctttggaggagtcaataagatgatagacttgatgttatgaaatgtgatttcttgccataatacttctcatcttcagtaacttcaaatatcaccacacactacacatctttgaggccaaagaaggaggaggtggaattcccttaccacacatatgtaagcagagatgaataggacaaaaattgatgaacgttttggggatggaccaaaacttgcccatcttttgaaatcacgatttacactaaaattagctaaacctccaagaaaatgaacagttacaagtgatggactacatatttttttttaaagcgttcttggtttctttcatttgactgcatgacactataaaatcacacaagctaagaccaggagaaggtgcgtgcagatgtgcttctgacttcttgaagacctacacatcttgctgaggaattctttgcttctttagtgagtggtgctgaatggaatgttagggctcctatagctataggggaaggttattttggggttattagtgatacctggtagctgattcctgattactctctcagactgtcttccctgtttcctctcttctgttgaaaatgttctctggcaggatgatttctgtcaataagagcaattggctttcctcgtcgaggttcgtgcaaacagaattgaaaaaagctgagtgagtgggcaggtttttgctggtttgtttaacaatgatttgagaactgaaactagagctgtctgaaataataaacaggtttctcagtgactggaagagaatggtgttttgttctttgttctggtccttttctcttttgacagtcctatatccttgactgttttcatggctctgtattctatacatggcctggaaatttgactgagggtctcatagctaaaaagtattagaagtcgtggccacctcctcacggagctctcttatttcctcttcgccttgacaacttctgtatttgctttaggtctgaactggaagttgcttccaggcttatcgcccaggtgagttaggtgtctgcttcggtttcctcacacagtattgtcctatgtgcttcttttacgatattgcacagcacatgttattacagtcatttcttcaacgtttgcttcctcatgggactgtgagttgtgtggatacaggagtcatagctactttgcttattgctgatctgacagaacctaactcaatgcccagtagagaaggtctcataaatagtcatttcacaggaagaaatggatttatttttggagatgtcattaccaaataaagccttctaggcagcagcgcccatgctggccatttgactcaaactgtgctgagggaagtatcccctggccttggaagatgagtgtcattttgattccagctctccaggtttttcatcaatgtcagcacctgctgaaaagaaccatcaaactggcactactgctgacttgtttgcaatccttttttaaagtttacctaaaaagaaaccataaaaagcccatcagattgtttttccaaaatccacatagacaataaaggcatttatctaaataatgttttggcttcacataacatcaataaacacttcatgaagattaaactgactgaaaaccttttatacttgtcaactgatttctgttggctgagttgattttctttataaagaatttaaaaagtaaagttgttttgcattaatgcacttagggatgtgtaaatgattttccttaaatcacatttttctgacaacgaacacggagtgaaagattattaaaactgatttctcatgaagttgtttgcatacctcaaacaaatatgtgaggctgtctccatcagtgaatgccatgtgttgatgtgattgatgaattataattaaccttggcaacatgttttacagcttaactttaaggatcaatcgaaattagttattctgaaagtcagtaaaatcgcttctatcctcagcttactgcaataagtaatggcctttctctggaagagttcttaaaatatagtgaacaaatacttagctattgaatctactttttaaaataaatgagagaccaatgggattggaataacttaatttgaaggagagaagtctccaggctgatttagtggctgttctatcaggagtttccagtgggcagggggatcagttctgattaacagttgaggcagttacctaattaaaacagggtgtatgaaagtaagggaagtgggatagtaggggtcagacatctaagaacctctcttccccctatccaatcaaagagaaaagctgaaaaaaatctttattttctgaatgtatatttaatgaaggtggagccatgtataacactaacattatagagtgatattaaatagggcacaagatatagatcacttaaaacaggtgggttcccttaggctcagcatatcaagtgacaattttttttttggtgtgctgccaactggcagagccttttgacaaatgtgatggaccttggaaaaatgataaatgtcttgaccttggaaaatccccttttggaagactttgtcctaaatgcttattcattataccctacagtaatcactgtcaaatatcaaaagatgactccttttatagctcgtgcaaagcttaaatactttagaacatgactgaagatgaccaaacacactctccagaaagttttagtcacctgaccatagcccctatgtttttgatggtcattgtaggcatttggaggtatcactttggacactctccttgaccttttctccgcaaggtctgtcatctccatttagactacacaaaataacgtaacttctctactcactcatcctgcatatcctctgctcccagtagggctctcaataaggcaattacttatctctgtattagcaagggggactctaattgcacctttgcatgaagcatgggcaattaactaaagggaagttgaagctttagtaactctccaatggcaatccatcctgtcctgtgccagcatggccacccagagcagacccatgcctgctttctgcggggggatgtgggatgtttggtcccagaaatattaaaaattactggtgttatctcataattgtagcctgattaaatagatcttattttttgttctatcttttgtgcaaaatggcccttgtacagaaattttctgagatactgaactatggaaataaccctgggattacattggtacttttctggactggaagacttggagtgacatgctgcaatttttaccaagttttgaatagatcatatggcttattttcttttaaatacttgcattgccgtagtgtaggttcctgagctaatttccgtctgggatgaggtatggtcttctgatgtccagtcatgggtccagatggtgatggtaagaaagatagcatgattgctgaatggcatacagaaggaaacagaatttatccctagtaaagagatggataggaacttactagaacaacaggatatcctcttgtgattaggagaggaggtattactcttcagcaaagacctggggtactagataagatgtattggcccggaggaaacaacagaagaagaaatctgttgcacagttaagctgctgtggttggtggttggtgaggatggagaggaatgtggggatggggtggaactgactccagggactcttttaataagactcaacgtaattcaacatgcagcttgcatgaggaggacagggacactccagtggctcctgtaattgagtcctgacagtgaatctaaattccattttacaccaagaaagtctagatggagccagaggtgctttccctgatatggccagatatgagaatcaagggagggcagaggaagatggagagagtgtgccctggcagctatcatctcatattctctggactttgtatttcccttgccccatgtcaggttttgtttgtttgtttgtttttgtctgtatcagtttttaattcatttttacattattcattgaatatattcatagagaaaggattgacagtagacatggctatttgttggatttcttctgtattttatatgtagccttttggtaacaagcaaggtggacatcctttgttttatttcacctaatcctaatactatgtattccaagcctgtgcttatatggctgtgggtctcaaactcatatatctacagaagtcaagcagaaatgtaaatcaggagcaggatagtgggggctgtgtccagctgaaggctgcttgcccagtctaatgaaactgatctagaggaggttgttctagccattttttctagaagtggacacatacgaggcagataactagattgttttaaagaaacattttaattttgaaaacattacatttatttatttatttatttatttatttatttatttatttattattttgtaatctggagggtttagctgacctctgggccaccaattcacctgcactgatgtgattgggagccagtgagagttgtggatctgtgtcttgaaaagtcacttcctttatgctagtgtagacccatcagtagtaggtcacctggaagccagggctctgcgtaggactcagggcagcaggactgaaagttgtgtaacacagcagttaaaaggagggctcaggaccagaatgcctgtgcttgaattccagtccagctactaaccagccatgtgaccagccaagttgatttatgcttctagcctcggtttcctcatgtaaaaagtggagaaaatataagtatgtgtttcacaaggttgttgtgatgattaaatgagttaatgcaaattagcgacaaaggtatgtatgcatcctcactgttaggaacgagggagcaagatgggacatggtggtcccctgagtcgcagtcagtgaggcagctgtgtccatgcctgtgggatgcttttccactagcacctccacaaaatttttaattcgaagggtaggatgagggatctgagattttaaaacacctcccaggtgacttctgcaagaaacacctgcagaggagagagagcttggtcactggggtccgatcctggccccggtgtttactaacagtgttgccttgggctgatgactcatcccaatctctttggtttccaaacgttcactaatgcgatctgctctgtgaggctgatcatctggcagagctcatggcacttaacacagactctacaacacgagttctcctgtcttctcggtcttaatctagtgcaagtctccccaccaagacttgggaaacactcctaaggaaacaaagaggaagaaagtgagatcccaggggtgaagattggatcctttgtgtgcttagttctgaagtggaatcaaatcacttcagaagttggttgtgtgttggcctctggtgaatttgtttcacaatgccatgtaggagtacatccgtggcttctcatatttgtttgcctaactataattgagcagcttgaattcaggctacatttttaaagaaaactagtgatcatattcacatatgatgctctggcagtacacagagtcaagttttcactggaaaatagctattaaaacccagcaatgtaagttttcctatgcaaccttgatttattattttgtcaaatatagttcaacctatatatagccagttaggagcaaaggtgtagggtaggaaatctctagctcggttcctatagtatccaacattctataagaaaacatgcacacacttatcaacaggttttcaataatgaaggcaccatacaacccatgataattatactaaatatactgatgcttatgattttctcatgctgtgtatctggaaggagcctggtgtccagcctcatactgggtcatggaagtagcctgttgtgtctccgtgttctaccatttatcacagggcatcatttctgcatctcgagtcccaattcacaaaattgaaagatctctcaggcctgagcctattgttgttttatctttgaatttttgacaacccagaacatgccacatttcaggaaaggtttcttgaatgagtgcataaatgaagctttgataatgatttgacatttcagcatcttctggtttgctcgtagtttgctaaggaggaaaatgaaaagagagaaagttagagagagcattgcgagcattgcgatttccaggatatacttttataatgagttgttccaatacagactgcaagctcagaactttgaattaactggcacccattgtatgccacctgatgttagtgacaaatgtacccacttcagaacaggagccaatatctgcgtatcagggagctgcagagatgacagtgaaaaggtacatggcaagtgatgaatggtcagatgctaatgccagcaagccctttgctacagagatggagagtttaattgttcccactttgatttcataccgcagacgccataaacatcttagtttaatcaaccagaaacatgggctgtcatagatttaaattcatagcagttatgggtctatatcaaaagctatagagatgcttgttacacacagatacaagaacaggaatggaaagcactgatgtcatccccatgggttaaactggactatctgtctatttttcctgcagggtgaggagtttattaacaagaaacagtgtttatcatactaggcattcagataaatccattttccatttaatttattcatttggaaaggtcaacttttccaccaaaacaatttctgtttctttaatgatttctttaataactttctgtatttttgtttgtatttctcttctctcatttaaaaaaatctcttttcaatatgccaatttaattttagcacacctaatacaaatggcattgaaaaacaggtttcttgagtgtctttttttctttttaaaattattctcatcacttcaccttaggatgttttgtaagcgcatcacatgtgtttcatgtgaacctcactcagtactggatctttttctttccatttacatcctaggaagttattgtttcccattccaatactgtatgcatttttctttcctaattggcgcttgctagtagacagaaaaacattacgtttaaaatccatttggctttaaattaatattttagctgtatctgaattatcccatgaggccatatttatcttggaaaacagattgtggttaaactcctgtttctaacttttatttgtttggctgatgccatctttctgttcagaaaaggagttagggcagttgtctccttccactaggccttgaatagcaaatgtttagccccgagcaaaaaaacataactgccttctgagatgtttcaggctttcattcatgctgtagatgctaattttggaggaagacagaagcttatattcacacagttactaaaagagcacctgggtcagggggtggagactcggtttaccaagttcttaaaagacaacatggctcttctgacttcagcagataaagaggaatcggggcattttcattcctggatcaatcccacttcttgttcatatggtctgtttattgcaccagccattaaccaaacttatgataggaaagtgcagctagtttttcaaaataatgttttaagtcttctttttaaaaaataaccaattcccccaggatataatagtctaattaataaactgatgaatgttataatccattagacagcattatcccgagatggaagggataggtattatttaataggaatgtccagagcagagtttatcagtactttcttgtcacatgaaagtacagttcctggctcagaacacacgccaaggctggtggccagagggaagaaagaagggaagaaaggagggaaacagttgaagccactggctgctttcttctcaagagcatgctttctgttcaaagcacttagtatgtttgcctccaaattctgaactcctatgacttcctgctaaagcactcaccttctttttatttagctttccaaccacaagtcagagctgccctacctcagaatagagcttctttattccttcaaattcccaagtttatttacatggaaggggcatactgctcttgttagaagaatattaagaatatccttgaggttcccaagaattgtacaaataactgttgattctttggtgatagacattctgattttcaacatagaatggctatgcagagtagagggtgtctgttatgtgttgattctacaaacagaagaactaaatccacctgtgtgttcagttttttatacctttatgtcctttatattcccaatgggggtgaggagcgcaggtaggaagggtaagagtctaagaaattgtgctaaaaactcataagcttttggtttcaaaatgatttggcaaaggaattttatcctgagggacctgagtttggggtaagttttaaaggaaaatagtgaaaaagtagcaactatagattattagttacatttaacatttcatgatgggatggtggtgtgtgtgtatgttgacacataatgtgtatgtgtatatgtgtttgtgtgtggatatatgtaggtgtgagtgtttaaggtgggagtcttttgactccagcttttatcattgaatgcaaagggcagaggaaaattcacacagataattcgaagtttgaacatttatattttttgtctttatatctcatattcctaacatgggtaacaatgtgcagacaatttaattcttttatcctcagatataagcatttatttatttttatttacttatttacttattttgagatggagtctcgctctgtcacccagactggagtgcagtggcatgatctcggctcactgcaacctctgcttcccaggttcaagcgattcttctgcctcagcctcccaagtagctgggactacaggaatgtgccaccatgcccggctcacttttgtatttttagtagagatggggtttcaccatattggccaggctggtttcgaactcctgacctcgtgatctgcccacctcggccttccaaagtgctgggattacaggcgtgagccaccgtgcccagttagatataaccatttcttataggaagacacaatctttgttgaagaatactttgaaagaactgcattaaggaaatcctgatctgggactcagggtgtggcacctagggagcaagtgagaagagttaattaaagtactgttatagcaacagaactgggcagtaggaactgcaatgtcactgagaagaggaaggaggataatagctggctgatagagtttgatatgtgtccccatcaaatctcatgttgaattgtaattcccagtattggaggtggggcctggtgaggggtgtttgggtcatggggcaggtccctcatggcttggttctgtcccggtgatactgagtaagttctcatgggatctggatgtttaaaagtgtggcccctgccccacaagtgctcttgtgcctgttttcgcctgtgacttgcctgcttcctgtttgttttctgccatgggtaaaagctccctgaggcctccccagaagccgggctgatgccagtaccatgcttcctatacagcctgcagaactgtgagccaattaaacctcttttctttgtaaattacccagtctcagatatttctttatagcaatgcaagaatggcctaacactcagggtgagcatgaacaagcagggagggtcaaagaagaggaggtctttggtaggagtatgggtcagggagtggggtgagggtgggcagcatcttggaagagggtagataatgcttctctgagatttctaaaatatctttagtttttattgttcatgatctttcttataagagaattatttttggtagactcaaattcaagctgtgttctgggttcaggctggcacagattaaaaactgaagctggtgaaggagtggccacagctggagggaccactgggattctgttttcttgagactttggtcccgacctatatggtgaccattggtccaacataggttgggaccaaattctcaagaaaccagaagacatggttcctccctcaggttgctcacagcatgccatccagtggtcccttgttgatcatgattatcgggagtaaattctgtgtcaacaaagttgacctggctatatttaattcacccccaaatcaaggccagtactcaagtcattttagtaaatttctgtggatgcagtactacagatatgtgattataaggggagccccgatggggtcccatttattcctttatgattaccaggagaattgaaaggcagatctttttttgatgaatgtgaatttctcttactatctgaattgtggagcccaattccattcaaataaattatctatagatttactgaatagggaaaataattttactgtttattgagaggctgttgtatgctacccttttcacttacattaatttatttaatattcacaactctcctgagtggctattataattcttattttattactgaagaaactgaggattagagaggttaagtaatttactcggtattattcggttagtaaatgggaagggcgcaaagctcagaggtgtgtatggaaaagacattgtttttcctgggctgtagagggctggaagtgctttcactgaggctcaggcagtaggagccgggcagcaaggaggaggcagcctgaacatgggccaggatgctgtgccgtgtgggatgtgttcactcagtcaacaaacatttattgagtgcctaccacatgccaggcaagtaggcaaggtatgcctaccacataccacatactgctccaagtagggtggataaaaaagtgaacaaaagaaatcctctagaactcacgatccagtggaatgatgctgtcacaaatgcaatgacactgactcaatggtttgcagcagcacccagaccatctattgttgaggggtttgacattccttctgatgactggcacatcggagcatgctgacttatctgcctacacactgtgttgtgaaacacacgattgtgagatggctcatgagtaatttgtcacattcctacgtatcagaactggtcaacctataaatccacgtttggtcactttagcattaatagacatgctgtaatgactgctggacttgggcacctcttcccaccttggacaatgatttgtaagcacctgtatctttagtagaagtgctgccacttccatccttgatggccttgatggcatctttccaggagcactgttctcttctaagtccatgctgctccctgtacttcttggcttttctgtggtataaggtcccagggagggtaggacattgactttttctctaactctttgctttagtttctaaacctttgtctttgacttcgctttctgattccacccttcacgccatcagctctagagacaaaggtaacaggacaaagaatcagggaatgaggtgagtagtacctgtctctctgtcccccttttctccccctcctcaggcaaaatcccttccctccttcagctgcaatgagacatcagaaagggccaacgacttactagttatcttgtgatccatttaggaaaagagcaaagtaattgcaccatggttagaatactcagtatataaacaagaattcaagttctaatatctgcgatagacttattaaagaaagaaataatagtagattagattgaagtttatccttataataacttgtctcttgctctcttgcattcacatttgttttcttgagatgagataaaagatttaatttactgagaatttgttatgtatgaaaataatattcatttcctccagcctttcaatttttttgtcacgaagttttgtataatatatacctttatagacatattttcatcttttctacatatgtgggaatgccaaatgaaagccatttttcctcaatataacatttttaacaagagttcttaaaataatgattccccagttaatgtatacatatacatttgcaaaatagcaagttcatttggtaattgcagaagaaataatggctttaataaccactgctccacttggtgtctgcctctaagcattgttaggacagcaagcatcaggcaattccccatggccctgttttctgagaaggttctatttatgtcttccgaattttgactatattttgacattttcaagtaagtgtatggcatctgttgaataaatgatcactcaaaatggatttgcctcaattatcacctaggctttaatctctctaactacaaactcccccttcctcactgttgctggcagtgacacctgcattcctgctgcaccgtcatccttgggaagggctttggagttgcaatcagcatccttaagagaagagtacttaggtgtagtatgctttggctgttctcataagtcgttattggtcagcctgaagcctcactgttacaattactttgtctaattatgatttttgctgtcaaacttatgttaaaatttcagcaataacagtttatttgttcagtgctctcactgcattataaacatgaagttttcacattttgtatgttttagtaatcatgaatgactttctagtattgtccacattatatatttgatatctatttatactgcgaattaacactgaaacaatgaactaacgtgattttcttgaagacaacacattgtgttcagttggttctctgaaccctaaataaagctgaaaagtgtattaattttggtatggattccctaatgattgcacagttacttgtatatattttatagctgtaaatcttggtggataaactagaattagcagtgctcaatgacttcaaatgattttttttttttttgagatggagtctctctctgtcacccaggctagagtgcagtggcgcgatctcggctcactgcaacctccgcctcctgggttcacaccatctcctgcctcagcctcccgagtagctgggactacaggcatccaccaccacgcctggctaattttttttttttttgtatttttttagtagagacggggtttcaccatgttagccaggatggtctcgatctcctgacatcgtgatctgcccgcctcggcctaccaaagtgctgggattacaggcgtgagccaccgcacccagctgacttcaaataattttaaagattatacacacacacaaacacacacacatacacattatttttcttttgaactgaaataacacctggtttcaattgttatacatgttttctcagctagtgctattgcagttgaaccataatatatataaagacaatatgtggatcctagaggtaataaattatttcagcaaggttgtagagtacaagattaacaacacacacacacacacacgcacgcaccagtcacatttttatatactgaaaatgaacagggaaacaaaaattaaaaatgcaatagtatttataattactccagaggaaaagacgtgattagatgtaaactttaaaaaacataatctgtacatactgaaaatttaaaaatgctgacaaaagaaataaaaaacatcttaaataattggagagacatatggtgttcatgtactggaagtctcacatagtaaagatgttaattctcctgaaattgatagtcattcctataaaaatcttagcaagatcttttgtagataagcttattgtaaaaggtgcatgacagatcctagaatagttaaaacaatgttgaaaaataataaagtgggaagaattactttgctgaatattaagcttattatagaactacagtaattaagacaatttggcagcgagagagacacaaatcagttggacagaatagaaattctttaaatagattcacaccaatttgcccacatgatttttgacaaaggcacaaaagcaattcaatgcatgcaggatacaagtttcaacaaatggtcctggagcagtcagatattcataaggaaaaacaatcaaacaaacaaaaaacccaactgaacctccacataaacctcacaccttatataaaaatcaactcaaaatgaattatcggctggaaacataaagctataaaacttttaagaaagaaatacaagagaaaatttctgggatctagcattcaacaaagtgttcttaaacttgacaccagactcaatacataaagggaaatgttgatgaagtctactttatcaaaatttaaaatgcttgtctgagaatgagcttgttaaaagaatgaaaaaacaaagtaaagactgggggaaaatatttgcaaaccacatatctgatgaagaataagtatttagaatatataacacagtctcaaaactcaacagttaaaacgatcccattaaaaatatggaccaaacacattgagagacatttccccaaactgaatatagagagagcaaataagcacatgaaaagatgttgaacattattatcattaggggaatgcaaataaaaaccacaattgatatcaatatatagctatcataatggctaaagttaaaaaaaaagaaaaaaggaagtagtgacaacaccaaattctgacaggcatgcagagaaactggacctctgaaacatggctggtggaaatatatttggtacaaccactctggaaaacagtttgccaatttctttaaaaaaacctatccatgcaaatatcatatgacacagtacttgcactcttgcatattaacccctgaaaaataaaaagaatattcacatagaaacctctacttaaatgttcatagcagctatagtcagactaaccaaaaattaaaaacaacctagttgttctctggttgttctttggcaggtgataattaaacacactgtggcacatgtatattgtagaatactactcaataaaataatgaactgttgatacagtcaacaacttaaataaacctagatggaattaatgctaaatttatcaagccaattttaaaaggtcacatacttcatggcaccatttatataacgttcttgaaatgaccaaaatatagaaatggaaaacaatgtgtagtttccagggtttaggcaagagttcagagtgggagggaagtgaggaagcttataagagggatccttatggtgaaggaatattctgcatcttgagggtgtcaatgtcaacagctttcttgtgacactgcattatagttgtgtaagatattacctttgggagaactaggtagagctacatgggatcagtctattatttcttgcggctgcatgtcaatctgcaattatctcaaaataaaaaattgaattcagacaaaagaaacaatacatggaggaggcttttggcccctgtgggagtgctctcttgattctcctgttagagagagaactgtcttttcaggtacaagatgggctcctcagcctccgtcccagatggtctacgttgagttcaattttttgttaagtcaagaagatctgtacttagacggcagtataaatacttggcagacactgcaaaaatgacctcagtacatacaatatttgtcagaaagcttgcttggtatcagcattgttcagaaaaaaaaatacttgaagaccacaattctaaaaacttatctctagagcaagcctagagaggagagaactgagtgcctaagttcaattattattgagccatcatgaaattgtgtttacagaatcacactttggtgatcctagaagaaatatcttcctttagtcaaagaatgataaaatttctctgaggcattaaatttcctatgggaattgtgaattatatgaccaatttttctccttctcttaggctactgaaattctacagctaatttgatttattctgtagcaatgtgggggtcattatatatgattgttcaggcatgaccaactatttttccttggttccccatcttacctttaattaatgtatcttgttaaagtttctgagtctttagaagctgccttaaatctctatgtgaataaataaggaataaagataaatttatcttgatgtacctgcttcagcctcttaatatctcgtaattgcataggactgtcctggaagcatattgaaaaattaaaacaaaaaaagacttctatttctggaatttttctatgcctccttcaaccttgtatttagcaagcatatttttgcaatttttttttctttctctatcttgacttcctctctcttgttagccctctgatgaatgggccagtttgaatttgctactctggtttttggcctttgacaacctgccagcaaatgccccgcttgtcctctcaccaaggatgagaagtatcccatcctatgctctccctcagctctaagggatttactcaaaaagagaaagagcaattaggccctggacatgcattctaacttaattttagcctcagtcttctctgatggaaaccatgctttaaacatttcactccccactaaactcagttcatatcacaaatcctcttcaaaataacagatttatttaaccttaagtaaaattaaccttggattgatccgaggtgaataaagcattttagttataaatggaaagcattgagtctgccatttctagacccatttctaagatgcctaggatgcattagataatttatataaagtgatgttgtgtaactaataaacacatattctactgatgaagtgtgtgtgtgtgtgtgtgtgtgtgtgtgtatgtgtgtgtttgaaagtttggcagttacacatacagtcatatgccacctgccacctccgtattgtgctgtaagacttcttcagtcatccttaaggaagtgtttgatccctctttcttgttacatataaagacaatgcactttaaatactactttaaaatctgcatcagcgttatatgcctgcttggccctaggctccagcttcaccacatgattttctctccaaatgaaatatacacactaccttgggttcttctgtgatttttcctgtctactcacatttctttatttttcactcttggaatatctgaattcatcatgcataatttctgctgtttcatgtacttgaggaatgcaaatatttgagatctgcagctacagacaaatcaatagccttgtggttccatttgttcccttctagcttttaattctgatttttgacagtttctgaatatggtaagttatagccctgcattactaagagcaataaaatataaatatatcaattcctaatgaatttaaataacttgtgaaataaatcaaggagcccggaaaatttaaatgataaaatttaaggatgagattcatgtgctatttgctgactaatgtaaaaaaaaaattcaacctgtttatgactaatgttaaatcttaaaatttaaattgcacatgaccttggtctgttttgtttcactatgattatgactaatccctcccaaatttataacagttgaactaatgcaatgttgactgtcaacagttgaattcctaaaacaaaaataaatatgactcgtttcatttaagatgtagatgggattccatggaaaaggacaaagatggatgattatgctgtaatagaattggttggttgccagcgataagcttcaatataagagtggcaggtgcattgtagtggaatgaacaatgagcctagtgtcaaaatctctaacagtatgacctcggtggagcctgtttttgttatcgagggtacatttttaatagatgagcccctctggggtcttgagtaaagtgaagaatcataaacacattcactattagaatctgagggactctgtcatgtcgtcttccataccgctggagctgggtctgcctagttcccgaaatggacactccaaaaatatcttataggaaaaataaagaaaattctttcttcctgtgaaacctttcagccctctccaattattgtcaaatacagtgattttattcaggaggattcagtctgctattttaacctctggctttaatgctaagtattctagcctaatatttatactatgtatattttctcaacgtcatctaccagtcagtagggtaccttggtattcattttcttctgaatttatttactaattcaacaaatacttattgaattgtttatgtggcaggagcagtgctaagttctgagaacccaaaagtaaaaaaggacaaaaaaaacccctattttagggagctttaaaaattacatggatacatgtaaaattactatagtaagtgctgtgaagaagagatcctggtgcagtctatgcatataatggtagcttttactgatcatggaggtgagaccaggctttcctgaggaagtaattgttcaccagtatctaaaggatgagcatgagtaactcggtaaaaggttgggcatgagcatttcaggtgaagaatatgacacgtgaagcagtcgtgtgtttgagaggggtgtggtaaatgtaaagtcagtgtggccgcagctcagagaggaagaggaaggctggagaagtagtggtgctactaatgtttaaactcgtcccaaaggcaatgagaaaccatcaacgtttattaggcagggttgagagtgggtgaagtgacatgatctcttttgtatctgacaaaccatccttccttgcatgcggagactggctgccttggtggatgcaggtggacaaggcagccagtggagtggttgagagaagagatattcacggctaagatgatggtggtggtggaggaaagcaggtgacacgagtttttattggaggataaatttgcttaattgttaatttaatttatttttattgataaatagtatttgtacatgtttatggggaatatgtcatattttgaccatgcatacaaattgtaatgatcaaatcagcatattcaggaaattcatcacctcaaacattcatcacttctttgtgttgggaacatttcaactcttttcttctagctgttttcaaatatacaatacattgttgttaactacagtcatcatattgttctatctaacatcagaacttattccttctatatgagtgtatgtattttttttttttagatttgggggatatatacatatatttgtttgttaaatgggtatatttggtgatgctgggatttggacttctagtgaacccatcttctaaacagtgaacgtagtacccagtaggtagttcttcaaccctttactccctccctcctttcctcccctcttttggagtccccattgtctattgttttcacctttatgtccatgtgtacccattgtttagctcccatttatacatgagaaaatgtggtatttgattttctgttgatgcataaattcacataggacactggcctcctgctgcatccatgttgctgcaaatgaaatgactttattctttatggctgcatagtattccatggtctatatgtaccacagtttctttatccattccactgttgatggatacttaggttgattctatgactttgctattgtgaatagtgctacaataaacataaaaatgcaggtgtctttttgataaaacatttttttttttcttttgggtagatactcagtagtaggattgctgggtcaaatggtagttctattcttagttctttgagaaattgaatttgagaatacatttagcagggcttggagagtgggagtttaggaagctgatggtgaggatcagggcagatgactgccagtattgcttggaatatgtaaatcaaccattggagaggagggcaacatgtataacattataggagcttttgactggtttctctgcttagtagggaagaaaattcagaaagaacaagtgtagctccccgattctgactaaattcacccataagaaagcccctaaagttttctgacccttcactttgctgatgtattttatgcatatgaaatgatacaggtgaaaactctttgagatggatcataatgtataaatataggttattataacatattataaataattgtattacattttatatattaagtatacatatgtatataaggcatatgtgctattgcacttttttattgtatacattgtattgtttttttccttcaagaagttcatagaatgacaatattattttgtattaagaaaaaatctggaccaggtgtagtggcttgctcctgtaatcccagcacttcaggaggccaagacaggcgaattgcttgagctcaggagcttgagatgaacctgggcaacatggcaaaaccttgtctctacaaaaactgcaaaaaaattagctgggtctggttgcatgtgcttgtagtcccaactactggagaggctgaggtgagaggatcacttgagtccaggaggtggaggctgcaatgagctatggtcttgctactgcactcaagcctgggcaacagagtggagattctgtcaaaaaaagaaagaaagaaagagagagggagagaaagagagagataatgacagagagagagcaggaaggaaggaaagaagggagggagggagggaggaaggaagagatggagggagggagggaaggaagggagagagggaggaaggaaggaaggaaggaaggtgtggaatctaatcctcagatctatttcttaactatctaaaagtagtgtgttaatggtgtgatgcttatttattaaaactgaatgaatggatggtaattttgttaacatttagcttttaaaatctagtgaatatatgagctcattttactatataacacatttaacatttataattttattaaattgcaaacagactcgtaagtagacttttcttctctgtacctttggcaacatatttagaaggcagttaaccatccattgagatggaatataaagagtaagtctgaagtttacatttagattttgacagtcatcattagattatgcaaataattaaaaaaaaaccttacctcttgctagtatctgtgctcagtgtccttccaactccattcctttctttcatgttaacatatcaaagccaatgaggaattctatgctgtgcacagaatgccttgtctacctatggcagcaagggccactctgggatatgatatagtggaaattaaagaaaaatctgcctttactccagttttaggatgttttgaggagaggaatgtagattccatcttctcatacggaggtgttcattggggttgtgggagaggccttctgtagaaagagctgaggtcggctcctcaaggagttggcatagcaggctgcccagaataaactgacacctgatagattggagtgttcagagagatggaggcttccatggttttctgaccctggaagtatattgagatccagtgacatgccgtgggcccaaaggggagcaccccacccaccatggagattgggtttaaaatgatgggtcagcttctagacaaaagacctggcaaaaacttagggatctgcagccaagtgagaggcaagaagagtggctgagtcaaggatgacaagagggctgatgttccctgaggtcagaatggttgacaaaataagggattggagtgctgttctaagcacttaacacatatttagtacacctaatctcttttcgcacctatgaggtaattactcctaaaacttccattttgcaaatgagaaaactaagtacagaaaggttaagtaactttctcagtatcacacagctaataaatggtaagccaggatttgatgtagaaatctggccagcaggctgtgttgcaaccactatccatgagcacaaaatccacgagccatagcgaagaggccagcatttttaaaaatggccaagtggaccagggctccaatccagccctgttttttttttttattgttgttgttagtttgttttgtttttttgaataatgctttactgaaacaaagtcatactaattcatttttgtattgccagtggctgctatcctgttacaatatcagagttgagtagttgtaactgacaccctgcgggaggcaagacctcaaatattcagtatctagcccttgcagaaaaagtttgttgactcttgacgtgggcaaaaattatcaaaaccaccaacgagaagcactcaatgagagacaagggaattccccaattccaagggatgcaaaaaaccatcaatgtattttagatgactttttatctgtagaagcagaagagatcattttatccatgggcaaccccattatacctgaaaagacatttaactactggctcggcctaaagtgtaaactgtaaaccagattggatatttaatcaaggggctcagaaaaaaatgacaggagtacacgtgtacacgcacacacacacacaccatgtgtttgtgtatatacacacacaaagaatgtcaactatatatacaaataaagaagtgtaaacacattgttagtttggggattaatatttgttatgagttagtatttgtcttatgttaataaagaaatatttatttgagatacctgctgaaatattgatgggtgaaattgatatgctgtcctgaatttgtcttattatagcaaataaaatataaaatatgtttgaggagtatggtgcaaaagaatagctaaattaatgatcattgttgaagctaaagtgattaatagatgatggtttcttataccattccttttacttttgtgtgtttgaaaatacccataatcaaaagttttaaaaattgcaatgtaaattatttagacagttttcatattttaccatgaagtgaatacagaaaaattaagtgatttcattacactcttgccataatgttcatcccttattttctttgtactatcgggaaagaactagtgaattggttcgaggcatagctaagaaaagaagatgagacacctattggggagttaaaaattacttaacaaatttgttttgccctgtttgccgtcaccacaaacatgaactgaagtgcgaggagtggcaaatggtagggaaatttatatctacagaaaatcacaagctaataaagagttccctaatggattctcttagattcccagtaggtagattatgaaatggttgaatttcacatcaaacccattggaagggtggcagatactctctgagttaaaaacacacacacacacaaaaacacctttcagcctggtgcagtggtgtccacttgtactcctatagtcccagctactcaggaggctgaagtggaaagattgcttgaccccaggagctcaaattcagcctgggcaacctaccaagacccccatctttaaatttaaaaagaagaagaagaagaaaaaaagaaaacaacttttaaagataatgttcctgtccttaaaatgaggagattaaatgtgcattaaaatatctcttgcagcaagtaatttggatatatttcatcaatatgtaatatttgtgctgtgttttaacagtggcgtgtgacatctgttgaaataaaagttttgttatgtcagtcaagctgacagtaaaaagactgcagaacagttttctgacatgctgccctaccaatttagccctggcactataatttccattttgatttccaatttgatccaatgattatgcattcctgcattcttaattttcaagtgtttatgatttctcgatgtattaaaatatttatgtctctatttgaagaactaaaattttctatgaataaatagccatttattcttttaacaaatactgtcttgtgccaggcactgttgcaggcacgacagcaataggaaggaacaagacagaatcctactcttttaaatgaaattgctgctatagtattcactacaatatagggtagatgaatttatctacatcctagtatggtttctgtttactgatactaatctattctgaaagaagcaaattaaaatctcccactacaattatttttatcacattttctttgcattttttgatttatacattcagtttccatttttatttatatgtatatgtatacacatatattcctatatatatatatatatatatgtaaatagttgcctttatttttaataaagaagcactttaccctgattgtacttttaagcttaaattccaccttgtctgaccctgatattgctaattatgttactgttactaacttttgttttggcctgctgtattgttgcccaggcctttatttaagctattgatcatcacatcacttttttgtgtatttctttttggaaataacaaatggcttggttctgtttaacaatcttagttaatagactaccttttgatatgaaaattgactccatttagagaaaaggtggcaatatgtgtaatttttctctttctgtttattttatgttatactttttactgtatgttttcttttgccctttcctattttttttttcaacttggtcaaaatactatttttattttcctacttgattgtttagcagttctgtttttgactccattaaaggttaccatctgcagcagaaaaagttaatgtagtactttacatgaaatttttgctgaaacctgtatttattttactagcattacttatgtaagaaaggaagaagttattgcaaaaaaaatctatatcatacccacagttgcatatagcaatttatattaaagttaattacaatttaaacgtccattcctagccacaatttatcagtaatcatacgtgtttgttggctaccatattgttaatagtgcagatttagagaacattttgatagtcacataaaattctgctgaacaataatagtatactttgtataaactatatataccatgtatatactttgtatactataatgcatacattttgtaagtttgggaggtaattgttagtaggttaaatattaatgattaataaaaagttcaatttcctaatacaaacatgaaagggcaatacaatttcacatcacagaccttttaaaataacatcagagtttaagtgaggattatttaacaataaattatttaagttaatgaaggatatcccaagagaacttcttgcaaacaaactagccaggactcaatttcacgatgacaagatttcgagtaactttaaatgtgacaagaaaggacgtttgccccaatgtgtctaatgcatatacacttaatgtccttaagatattggacttgtaaatagtctgaagcttttgccattatttcaataatgggtcctagtgtctagcttaaggcaatgtattcttaaggcactggtgtcaatggtttttctgttttttaagatgattcattatctgttcaatgaaacatgtggcctccagtatcaaccacaattttatctgaagttggtgacaatttggaaactctacattgtatttcacttttctagcattaataatcaaacacatatctctctactattagatggaaatatctctattttcttcaccaaatactttcaaggctgtttctcccactcaagtaagataaactttaaaataggcttgatgttcactccatcttccacctcaaagcctgggttttattaaaatagttcagtagttctatagtccagaatactttaagattatcctgtcattacacctcttaatttgaaaaatctcatatatttccagatagcctatgcttattcatttacatactactgtgcgtgtataaacacacacacacacacacacacggaaggacacacaacctaccactcttcccccttatcctctccaattcatctgaggactctattatgatttgagtggggaggtgttcttatatcattccttgaatattgtcatctgatgtggtcagtgactgataaaaatgtttaaagtcatagtctttgtaattacaaaattagaaaaacacttaaacactgttaattagaagatgagtataaatgcgctgggtaaatgtgctgggcacggtggctcacacctgtaatcccagcactttgggaggccgaggtgggtggatcatgaggtcaggagttcaagaccagcatggccaagatggtgaaaccctgtctgtactaaaaatacaaaaattagccgggcgtggtggcgagggcctgtaatcccagctactcgggaggctgaggcagagaattgcttgaacccgggaggcagaggttgcagtgagccaagatcacaccactgcacaccagcctgggggacagagcaagaccctgtctcaaaaaataaataaataaataaataaaaaagaagatgagtataaaggaacttggttccttccttatggatgtttagcttgtttaaaatgttgctatcacaagcaatgtaacatgaatgacattgtcatttcctgtgtaggccagtatgcctaggatacaatcccagaagtagaattggggtataagagtgtgggtttgtatatttttattagatagtgccaaattgttttacaagggtttctacaatcaacatttccactagaaatatatggaaatccctgtcttcctgcaacaattttggaggtttggatttttagagccaatctgataggtaaaaaattgtatcgctgtgcaatttaaacttattttttcttattttgaatgtgactggaatcttttcatatgtctaagagtcatttgcaattgctgtttcataactttctatttcttagcccatatattttctctgaccattgtctttttcttgttttccgggagcacttgacctattagaaacataaactctttgcagagtaatttatagataaaaattatttttccagtttatcatttgtcttttgattttacttgcagggttctttttccactgagcattttgaaatatttttgtagttgaatttatttcttctttatttttcctttctctctttctttcttttagagtttctggattttgagacattgtactgtattggtcaggataggtgaggttatgctattcctagctcatgtggttgttggcagaattcaattccttgcagctataggactgacatccctgttttcttgttagttgtcagcctggggctaatatgaattcccagaggaccatgaaattccctaccatctttcttttgattaccttaaaaccaactgatcagtgactttaattacatctgggaaattcttttactttagccatataatgtaatccaatcatgggttgacattccatcatattaacaggttccctctatactcaaggggagggattataccaagaatcttgggagctatcttaaaatattgactatcacagatcttcttgaaatttctcatcttctggtttgcatgtttattaagtcatcagattcctctttttttttttttttttttttttttttttgagacagagtctccctctgtcgcccaggctggagtgcagtggtgcgatctcagctcactgcaagctccgcctcctgggttcacgccattctcctgcctcagcctcccgagtagctgggactacaggcgcccaccaccacgctcggctaatttttttgtatttttagtagagatggggtttcaccgtgctagccaggatggtctcaatctcctgaccttgtgatccacctaccttggcctcccaaagtgctgggattacaggcttgagctaccgcgcccggcccaagtcatcagattcttaaagcaggtttataatgtattttaatatctgataggaccagctctcttgttgcaattcactggcttatatttatttgataaaatttccatatgggttttagaataaacttaccttgttcaaaaacccctttagagaattttataagcatcatgataagatatacatgttaacttatggaggagtggcatgtaagtgatggagaggtttccttttcaataaaatattgaatttccatttactcagactcctttggtttcaattaatagctttttaatttttttcttattatggttcttatgttttatttgttttgagatattttatctttttgttttgattacatgtggaatattttactaatatatcctataggtattattattttcttaaaagcaagctactgaattcagcatattcattatatacagtaatttttcagttcattctcttggattttctacttatacaattctaactgctgtaaatagtgacaattgttcctcctccttaatttttttgtacatccaatttctttcattttctaactgactgctactaaaatataattttaaagaatactggtgactggggatattgttttcttcttctcaccctagtgggaatacctgcaaggtttgacattaaccatgaagctattctaggctgagagagatatatttatctgggaaaagctagtatccatctgttactgttttattgattttttaaaaataaataattattgttgaactatgccaaatgtattttaaagcatcagttgagatgattacctaatattccttcttgaacttattaatatgactttatataaatagatctttgattattgaactatgcttggattatttgtattaacacttgatcatgatgtattattctttttacatgctgctgcattcagtttgctgatactttatatggggctttcacattacaattattaggtaatattggtgtataatagatcttgatcaggtactggaacgactattaataaaatatttttaaactaattcaaaaagtgttcttttatagtctaacactgtttgaataatatgataatctactttaaaagtctggcagaattcggccgagtgcggtggctcacgcctgtaattccagcactttgggaggccgaggcgggcggatcacgaggtcaggagatccagaccatcctggctaatacggtgaaacccgtctctactaaaaatacaaaaaaaattagccaggcgtggtggtggtcgtctgtagtcccagctaatcgggaggctgaggcaggagaatggcgtgaacccaagaggcagagctttcagtgagccgagatcgcgccactgcactccagcctgggcgacagagtgagactccgtcttaaaaaaaaaaaaaaaaaaaaaaaaaaaaaaaaagtctggcagaattcttccatggacacattccatcctattgctttttttgatgggacagggaagggttctttgacaacttcatatattttgtctgtttagattttgaatcttcccttagtgagttttggtaaattgtgtttttctagactattattcacttcatcaagctgtagctctatgaagttttgatatccagtaccagtctttaaaatacttgattttaatttgcaatttcctctgacataaagttacaaacttaattttttaaattcctagttgtcttctcggttagtcattaatttcttattttatcactttttttgaagaatactctgtgcattttcatatgttttgggtgctattgtcaatttttgttaatatccgataggcacataaaaattgtactctctattaaagggcaaatgttttatacacacacatatatacataatgataaacatataggtgtggtatgtgacatatctatatatgtcaatatgatctatcttattatttattcttttccatatttttaagtccttttattcacctgtgtaattatctgtgagagataagttaaaatcgctcattaaggaagaggagaaaattaacttggttctttcctgttcaaactcatgtttacttttatgattaagagacagaatttgacatgaagtcactggttcatatttttttcattgtgtatatcgtaggttgttacattatgtggagaaatccaagattagtatgatattttcctttttaaaaattcggaaagatatattttgggcaatgaggccaaaattatcaagtcatttaaaaattccaagactttaccaggatgtttcacagtgttgactatttgaaccagtttcctcaagcactaaaacattttcaattttgagtcatcttccttatttttcaacattttcttattaaaatatctgtaatatttattaggttggtgcaaaagtaattgcaggttttgccatgggccatttttccctccaatttcatcttttttttttcctgtcatttaaaaaaatcttctattttaattattttccctgaattttgccagctaatatttagatggcatctctggatggtttcactatttttttcacatttttttttacatttatgctgtgtaggtttttttctttataaatgttattacttcgttaatttattatgaattcttagctaaacatttggatacttttgctttatatcagtatttctcacttgtgagtgatctacatcaaatgataaattccaatgctatttttgatattttttcttaaaatattataaattctacttagtttgagggctacttcctcaaaatctcatctcttattccaaacaagaagtatagtttttgaactccgagttggccccttatcttcaagaaggcattgatttattgattgattgactgattgagacagagtctccctctgtcgcccaggctgaatttgggatgacaggcacacaccaccatgcctggctaagtattgtatttttagttaagaggcagggttccaccatgttggccaggctgatctcaaactcttcacctcaagtgctctgcctgccttgacctctcaaagtgctgggattacaggcatgagccaccatgcccagccagaaggccatttttgatggggctctctgagatttttctgcttctgggctctcttgtaatatcccgtatggcttctacttgattcagctatttttggaagcccttactgatatttttgaatatgcagattggaattgtcacctaatgtccctgaaaatggattttgtgtatattaacattgtttgtgctgcatctttatgattaccagaaaaattatagggaaaaactagacatatgcagccatgtttataccaatattcctcctgttttttagttcaagtattaatatgtaactctcagaagctgtattttattaggatctttcctgaatgttccacttgctctgattttctctggctgcagggcttctcacatgtgctaggattttcttttctcagctctctgggactcaggctgagctccaccgtaccttaagctagagccgtgcggtgggtggcaggaagtgctgtggtttcctccacctgatatagtgaaagcagcgtgggttctctactaaggagccaggagaagcctctgttttccttctcttccagaggtttcagcctaaggtataaacaagacttatcactggtttatctctccctcaactgtttggaagctactgaaatcaggtatactcatatggaatgataccatcatttttcttcttgggatccatactttaatgcaagacaggtcttgccaatatccactactattgccctccccttggaattctccatcattaattcctaagatcccgtcaagctctgaatagagaagctttcgggactgaaggagagcacagatgtatttaagccacgatcgcccattctccctcctaattttgcctatgaatgggttttatacaaattgttatgagattgaagaactagtgaaaaattaattggtactagtttttaacacacttctctatacttataaacttccaggggtgaaatttgaaaggaaaatatttgttctgccacttgtagtatttcaaagtcttgcagtattttgaagtctcctagttacattgagggtgattatacttcattttacaaattgctttgcattacaaaaaaaaaaaaataggtttacagtctcttaagaagcccttcactgattggctaatggtttctgatggtctgtagggtctaaatttgagcatctgggagaataccactttctctatccaagctgcctagctgcagggaaaagagggtagacagtagcctgacttccagggaaatcatctgtattgcaggttagggccaaagtaggtcagtaagagtagggaggctaaaaaattgactgaaacaaagaggtgagtagcaagcaattattaggagcaaaaacaaagtcctggaatcacagtgtcggggaggtaaggatccagggtgaaggtgtgagcaggtaaattggaaggtgttctaagccaacatgtaaactcagcatctgccaatgcaatttctcccaatactgtccttccttgaatgtttgttagcttattattttaatggcaacatcagcttcaacctctccttgtctcttaacccacttaaacaatatgtggccattctatctccaaattatttccccaaccacactccccttcctacttttgctgtaacttccttttccatcctccattatgtctcctggaaaattgccgtcattcccttaactggtttcttcagaagcctccagtctctccctcccatccatccttctcaatgctgtcagagtaatcttttcatgtaagagtgacctccaattgtaagcgcgacattgctgcaatatcatttatctccatcattattgcagtttgtattttgcgattggaaggatggggcaggcaccaaaaaggtgatgtgacttgtgctgtattttccgagtaagtccaagaggtgaattatggatttttctaccaggctgactcaggttgaatgctgttcatttctgggtttgtgtctattatcctgcaaataacgaatacccctaaaatgttagtgtgcaattatgccattgggatagaataattctctacaacataaaacagtttttatacaactatgaaagtagtctggagatttcaactttcattcaaacaaaattgaaagaaaatgaataacgttgagacaactgagcacaaaagaataatatcgtattttccaaaatatacacatcaaccactttaggctattgtatgtgaaagggccgtaagggtagctgggtagaatatgcccaaaatttcttccaatcatttttttttcattgcgaaataccgtaagaactctatccagggagggcgactacatttttggcagggacaagatacaaaaactagagagatagttgttcattctttgagcagcaataaaaaattcagtcttgctctctctcttcccctctcttccctctctcctctctccctcattctactcccttagaatacttgtaagatgtcatatgtaggtaaaaggaatacatcatcagacaagtatgagcactggaaattagccaatgtagccaaacttggggaaatttatgtgttgcttactctaagattgaggcaaatgagagtgacagttctttccagctcctcccctgattactgatgaggtattactctctgagttgctctaagattgagccaaatgagagtgacagttctttccggctcctcccctggttactgatgaggtattactctctgagttgctctaagattgagccaaatgagagtgacagttctttctggctcctccgctggttactgataaggtattactctctgagttgcctagtagtaaagaggaagtgcggtcatctagcatcattcaggaggtgaatttataatggttcctcattgtttaaagcaatcttttatttctattaaatgtctatacttttatctaaaataatcatctttaaataactgagatcatacaacattccctaagtgctcctgtgtagcacaatgttatgacctcttctcttgtcttcttctcttctccacctgtatagagatagtgacaaatcaagtcaatatctgtgaaacaaatgttctcatgattggtaaagcactcactggctgtgctgaaatctgggtatatttatttttcattatagctaaataaaataaaaaaccgaatagcaacaacaacaacaacaaactcacaaaaatctggaagataggaatgttcagtgtggcaggtaggatcaggaaagcagatgagtaagtgtgctcttgctgaccgatatttaccaagcactttccaggagccagatagtaggtacactccctgcattaactcatttaatactcacaccaaatctatgaaggagggtttactattgccaccactcccccagtttcttatagacaaagaaactgaggcatagagaggttaatcattttgcccacaatcattcaagtagtaaatggtagacctgacgttcatttcctgtgatcttgatcctctccataagatgaactcagtcttatagatgctttttcaaccacctcatcgtgattacagaacattctggctctattactttgaacaaattattcaacctctctgccaactcgggacaataagacatatatgacacatgatcttcaaatgtgtgaagattcagtgatgtaacaggtataaagtgttcagcacagaagcctggtgcaggccaggcactcactaaatattggttgtcttttagagtgattttcttctacctgaatactcctaagcaagggtattttcttctttattttatatcagtgatagttaacagagggcatctcacacaggaaacgatcaaaagaaaggaagaattagagggaaggcttgatttacataagtgttggaagctggcgtttctgaagaggccattgaaggcatactgtcatatctgagtctataatgaagaccagaattttagcaaataacttgagaaagtgtccaagcaagcagcaaaacttatccctagaaaaactcatatataaaaaggttggcagaaaatctgaaatgccatcaagcaggagataaagatttggtacatttccatggtccattttcaatctttttacctgtatcttctacctcaccagctcctagctcctgccgtgaaagtttgggcctgaaaggcaagaatgcaatgtgattgtattcacaccaaattgtaaatgttgggcttctgttctttccttagatttgttttgattttgtacttggattagggggtattgcaagatggcacctagtgtatgaaagctattaattgccaagtaggggcaaaagatcaaaaacgaaaaagaaaaattgtagtaaaaaatctctttagcaagagagcttagataaattacaactcccttagagctttcttttttttttctatttgtacagcattagtaatttttgctcaatcaaaagactatgctgaataaatggtgttcatgaaaatggattgataattgaaaatggattgataattaattgttggctgtcaacggtggctcatgcctgtaattccagcactttgggaggtcaaggcagacggatcgcttgagctcagtagtttaagaccagcctggccaacatggtgaaaccccttctctaccaaaaatactaaaaattagcaggatgtggtggtgcacacctgtagtcccagttacttgggaggctgaggtgggacgattccttgagctatagaggcagaggttgcagtgaaccgaggttgcgccactgcactctacctgacagagcgagaccctgtctcaaaaaaacaaaaaaattagctgggcatggtggtgtgtgctggtaatcccagctacctaggaggctgaggcaagagaatcgcttgaacccaggaggcagaggttgcagggagccgagatagtgtcactgcactccagcctcggtgacagagcaggactccatctcaaaaaaataaataaatacaaataaaaaataaataaataaaataaaaataaataaatggaattgttgcgattatcattatgattattatgtcatcttttagttgagccaatcctgaatgtatttaatgtattagtcctatgctttaaggcagggcttggcttgtgctgcctggacaccaaaggtctcagatgccatctcctgaaatgaccctacccaggacaccaggaaacagctgcatggccagtcctgacctctcaaaaagcaaccgtagcccataaatagcctgatgatggatgtgggaatgagctgggacctcattcccaggtcagattctatgtgaatatgggttctggtttccaactatgtcagggccagcagatatgagtttgtgtactacaagtcaacatttgggaggcctttgtagagctgactccacatccattttatcctctctggcgattgaaggcttgggggaaaacagaagaatggctaaatgagcagtgctaagtcttgtatgagtaagatggaacagttcaagaaagacaattctatgtgcttgagcatcatctctttgattctgacccattttttccactctcctgttttaacctgtcttctattaaaaaagaagtgaattaaactgttttgaaatatgagctctgctacttactaaccagctatatagccttgggcaagttacttgacttctcatttagttcatgggtaaagtagaggaggatcataatagaacctactcaggcttctaaggagaaacaagataacctagcaaagtcctcagcacagattaaataataaatattacctcttgtgaatttttcatttgtaaggaagcattttatcccctattttctctcattagcttgacaacagaactttaatccacatgagttgatgccctataatagaggagttgtgggttgatgttattttaaaattctaaccacatttcctcatcttttgatgacacttcaaacttttcattcattagcttggtattgtcaaggcttctaaaattgccagatgtcaggttttaatttgcagggaccccggagatcatctcatccaaccctctcagttttatagtgggaaattaatttaaaatttaaaaaaaaaatgactgacccatttgtttccagcattctgtaactgcattaaaaaataaataaataggccaggcacagtggctcacgtctgtaatcccagcactttgggaggccgaggcaggtggatcacgaggtcaggagatcgagaccatcctggctagcatggtgaaaccccgtctctactaaaaatatttaaaaaattagccgggcatggtggcgggcgcctgtaatctcagctactccagaggctgaggcaggagaatggcgtgaactggggaggcagagctttcagtgagctgagatctcgccactgcactccagcctgggtgacagagcgagagtccgtctcaaaacaaataaacaaaaaaacaataaatagcaataaaagagttcacgggaggtaagctgccccaggttctgtcccaggtcctttggttctgtccaaaatttatgccattggttatgtcactcttaactctctaggacctcattttttacactataaactgataaatttgacaatctctagctgaatgtatatgtgtgtgtctatttacctgtatatttacctgaattatggtaataaatatagatacagatttttgttataccacccattatcagcataatgcaatttccatactgtatttatggtccatggttaaaatgatgtgtatacacatgtgatgttttaatatattagagctcatttcaaagaaaggcagtgcaaggtctgttattagcaatgtgtggggtcttttaaagtcaacacctggtgaaaatcctcactgcccggagtacttttgaaactccttttctgagccctttgtggagcctgaggcacactgttctcatgctgcttattgaacagcagagctgatctttgcctttcaggaacgatttcagttttcaaaatagcctaaagtaaaataagcatagcaatcaatatgggcaaaactacatttagtcaaaggccagctgtgtctagcagataaaacgacatgatcttcttgtgtagatcttacactgaagctggcaggaaattagaaggcagtggctgctcctgtgtgaatagtgcctccaaaggtgccgtctttgaaggatgacattactttgggaacatgggtgcattctgctaaaactgtatgattattatcttatgatcgtatctctgtgtcaaagacaacagaatcatatacgtttgttgttttttttttttttttgagacggagtctcactctgtcgccgaggctggagtgcagtggcaccgtgtcggctcgctgcaacctccgtctcctgggttcaagcaattctcctgcctcagcctcccaagtaactgggattacaggtgtccaccaccacacccggctagtttttatatttttagtagagacagggtttcaccatgtggccaggctggtcttgaacttctgaccttagcctcccaaagtactgggattacaggtgggagccactgcgcccggcccatatatgtgatttttaccatttgtccatagtcgcaataggaaggatgagggagatttttggcctagcataattattctaaggaaattcagttctgaccacaagcaatggtgttgttagtgtgagaacctggtgctgtgactggggcattccctcagagacttctacttgtgccttctctctcctatgtaggagatctcaacccccgcgaaaagagtgcattgcatttttactttgaagaagtttgagaaagaattacttacaacattattattaagaacttagaagaatattcaaaacactcctataactaacgtaagattatagcaatcaatgtgctggaatacaaggacactctggtgttgggaacgactgcattaacaatcataaattaagtatacaatttgttttgtcccccagtgaattctatgaggagatatactttaaagccagtcctgttgaaaaccctgatgtcttatgaaaaaaagtagaaaattgaaagaacactgacctggatttcaaattcagtagctgctgcttttatttgaacaaatatttttgcctacggacccttttttccccctcctggtaaaatgaaggggtgggaccagaaaccttctttaagtgacagtccactgtggcccgcattacacataaggccttgctcctggccgcacttctgtcatttgctccattttgtctgacagaaacgggctaagatttcatttcataaaacaaaacaaaaagtgtttctacttctaaaaaggaaaaagttgaaaatctcttcccaagttcccttatgtccttgttttcctgtagagaaggtggtgctttcatctttcctaggccgagctgtaggttcaattttctataatttcagaaaagcagagctgggtttacctatggagcaagagaatcttggcaggaggaaaccatggagcagattccaggcttcttactcagcactgggaggcgaagaacttgtcacccttgagaccctctcctcttcagtctagctcatgtgttcagcgtgcaggtcatttgtgccaattagcttacctttccaatcagctggttgtgacctgtcattgttgccagctcccaaaattggaaggttttcttcctaaaatatcagtcctatgctttccagaaaggtatagaatgtgcagtgtcttcacagcctgtagaatgtgtaatccctcaagtgagattacagaagacagagatttcaaattcaatatgtctaaggtagaatagatttttttttttttttgctgtaacaggcatgaatttcgtgtttcaatgatacaacagtaatctagtttgccaagctaaagatttggacactattttattttcctcatctaaatgtcagatccaggaagaaaatgaatttttttctctttagtcctgtcctcaatacctagaaaggtatttggcacattactggaatgacatatttggtgagttaatgaataaattaatattcttctctttaggtcatattctacatccagtcttcaagaattgtctatgtagtttcaggtcttgtttgcaaacccttctatcctttcagtctgtgctgctgctcactgattgttctctttcttacctcttccttggattatcacaattttctcctaagtcacctactttcagctgcttctggccaataggctctccatactgcttcaagagtgctggatgaaacatagcatatgatcatgtttgtggcatcacaggtggtttatgttcttagagctgtcgatcaagaaaaataatgagacaagtctcaatcattttaggaagaggtttatttgccaaagttaaggacggatcctgggagatgggtctgtgcctttctctgaagatgattttgagggctccaaatttaaagaggaaagggcaggatattgagaagtagacaatttcatgtaagaggaaggcagggaaaaaatagtcatctgtgcctttgtctggctcagtgaatctacatttttttttttttacataagatgatatagacaaatgaggcagagtaaaaattcagggaatctgcattttacataagataacatagacaaaatggggcaggggaacaacgagatatgcctttgtgtctggtgggcagggggtgatagtacctgtaaagataagctatcaatttacattgctatggcaaaaatttaacagaaacaccttaaatgatcttgcagctcactaggaatttcctcatgggcaaaatttgggtggggtgggggcataggggggcatgtagctttcatcttgtagccatcttatttaggaaccaaaggtggaggcaggtttgtgtgacccagttcccagcttgacccttcccattggcttaatgagtttggggtcccaagatttaatttcctttcacagagtatattttccacattccctgtgatgtatgtatgtaaacaccatacacagaggaaagaaaagaggtttaagattaccgtgtttcactcctctatgaaattcttagtcacatcccgtgatccttaatttataatccaaactcaacagggcatgcaagtttcttcaggacccttctcgtttgcatctgacaacttttgagtctatattctggccatagtgactgtctcgtggccctcctcatgcatgacttgtggtccacacaactttcatccctttgcaaatgctgctctctggacacagagtctttcagacagatccactgctctttgaagactcagctcatatgtcaccactcttctcactgttgcctctgctcagcccccacggcacagaacatgctgtattgtagcaaaatcaggcctctttacctcacaaatagaaagtgaacatcttgaaagcaagggcaatatctagtttgtctttcaactcctgctttcagttgagtggcagctcaataaatatttgccgaatgagtgaaaaattcacccagcaaccacattatgcctcttgggaaaagtaactcctaaagagtgtctttataaataataaataccaggcttttccttgtgcagaaaaaacagacctcccaaacatgtttattttggtctaatacacagaagtgtatattggtgtgagaacaaaaacccaccaaatattgttataggaaacatatcttactgcaacccagctgcatgctctgtgactttaaaatacatgtttaaaatgctttgcaaaattgcagcatctgaaagagaagtacaggatagtggtgcacacagagctggccctgcagagctggctgctgtggggagtccccttggttacatcttcccatctgtacagacagcagcaggtggaacctgagctgttccatatgcggattagtcaatcgctttttctaaaggttccaagaggcaagcttacattttgtcttcagatctttatatgaaaataccactgtggataatgaggctgttgtatgcataatttaactttcggaagcctaaattccgccgaaaggcaaattggtacctagaggcatgcaatttgcatggggatttcaagccctcctcctatctattgtccctggcatggtgttgcttttcttctaaattattttcccttgttctttgaatgcctaattctgagattgtaaccagattaccatgggctccatatttaatagtggtttcagaaacctgctgagcctgctttgaccatttctgggagcataagttggggtttggcaaacctctgccagcacccagaggcagtctttctaatgaatctgctccttagcctgcagcccacctgcctggagagggttaggaccagctgagcctgcagctgcccagagtgggaggagctgatggagtcctgtgtggctgacttcacagctcaatctgtcaatccggttggggacagatggttagagaactgtctgtctgaattgcctcagaaagaatttggtttcttggctgcatcttcaagtcatggtccactttcctttctgctctggactggagaatgtggctgtgttgggaagggtactaactctacttttcaaagcctttcagagtaaggatgtgtgtaagtaaatcaagggctcaggagaactaactgctgattgtcttctgatatttcgtgtgtcatctaataggcaatgtcgattttgcatgcagtgcacaggagcatacctgtcaataaattctaactgctcagaaatgatttcttctgagtagcatgtttgtattttatgaaggtaagccatgaagacccaaagatgtgccaatatgtttactgtaaccatattggataattttgacatatggtgaccagggcagtttacagatgactgagaagttctttcctgatgcttagtaaatacctaagtcatttgaaatgccaactagaaaccaaagaggaaaagagaattggtgtggaagaggagaaaaagaaaagaagaaaagcgagacagagaaaagccattttacctaaaattggaggtctatttcagatcaatttttagatcaagagatctaaatctgggtcagaactcactgaatacttagctgggtgaaattgaccaagtcactccttcattccttaaaatgaaggcattggacttaataatttctggaggtctccttgaaatctaatattcagaaaatattttatttgtcctctaaattaggttattgtagctatttcaaagatgactggggtatgtacactagccagaaacagggtagcaggtctggggtagagacagaggtccaagttccctgtgatatggacaacacataaggaaatactgcgtagaagagagtggttccccagcaaagtccccaaccccaagcctagaaacctgtggccttaaatgggagctggtattcctgttttcacgcccaaatgttgccttttccaagaccaatctggcttaccatatctgctatactttgctcatataaaccccaagctccacgagcagaagagcacgagagctccatcacctttccagctcctcatccattctgctgggagtcacctccatccagcaataaaatcccccgcatttaccatccttcagtttatccatgtcacctgattctttctggatgccagacaaggacccaggtaccaagaggtcactgagctggttaacacttaagctgtctgcagatagcagagctaaaatagcactgtaacatgccccctggggcgtcagtggttgcaggcacccacccctagatgctaccttggggctggagcccaaaagcatttgccctggctcctgcctgtctgtgtgctccccctccagtaaagggtttgagcgcatggtggctgaacaggtaagccacacccctgtcacacatcctgtggcaggggtgggggtgggggtcagggaactctcctgtttcacctgcagccccccaaataattatcattctttgagttcttacaatgtaccaaaacctgcgttgagcaccttaaatacattaccttgattattccttaaaaccacctgcgacgtgattattgtttcccttcttgtatgtctgagaagataatgacttaaactgcctcaaatcccttcatccagaaatgggatgtcctgcattttgaatctctgctttattctacctctataaatgtctaatttgcctaatagtgatcccctggttttgggttttgacaagataggggcccacctaccatttcctcggctattctatagttgtatgttataaggagaccttaaaataaagatatgatttgtcttgctaggagcaaagcatgtatgcatagctcatataagaacacatttctatggagataacattttgaaccaaagtggctttaaaaggcagcagagatgtgtatatttcctgaaggcatagaacctttttctccctctagttaacatggcccttcttttcttaagactgacagttgtattcttgttgggcagtcactagaatttgttctgttgccagacctcctggggcatcaaagtgctgtctgaattagagaataatggcatgatgaggtcaatgacagctctgaaaatgacatgttgccatagtggtaagaaaatttcaaaaatataaagaactccattatcttatgatattttattagtatctattctcctggcatagtacagtttttattcttctaggaatgggttgaataagttgagtccactcttatttttatgatctaatgcatagaggcaacatcaaaatacgaatgccttgcaaaagattgcctatgttgtgaaaatgagaagatgtagttgttaaatgcccataataagtcaggcattgtaataatttataagagtggataaaaatactagaattaaaatttaggggtttttaaaaattcctttttcttcacatctgaagtgtgatattgatctggatgtgtggttgactccaggatggtgaagaatatgtaagtagggattgtgataaataaagttcaaataatatgagattaaaaaaatctttatagaaaaggatcagggagatttgaatacaagagttatattgtttagttagttctagctttccaaagattttcagtagattttattaaaaggattatgttccatattagctttttttttttaaaattttgctttgcagacatttaaagtgatcctgatattcaatggcacatataaccttcattgatttgctttccagctctttgtgactttacaaattcaatgcatacaggtaaagtgtaatcaagttattaatctttgagaatctttatgtactacttataacagaatcagttcttgtgactcagtaaggaaggcaaacattttcatgaattgcagtctgtagaggagaagagtagtgttgattgtatttctttacttttatatcacagagttatattacacccagtcatttacatttgatgctatttgatatgataacatttgctatgtgaacagaattgtagaaatcaaaaatcatttaaaaagagtctcttcctcccagtcctagaataaaacagttccgtctggcgtactgttattcagagccttctgatgaatactatgttactaacgggtaagaataaggagaagaaaaaggaaaaaggagaaaaggtaccatttctgcataattgaaataaaataggaattactgtgggaagtatttcctggatgttccacaagaatttattttactttcagtctctaaattatgacagtgttgcttataacctttaacagttggattccagatgtcctccatttaacactgttcatccaaacatgtgtacacaattggcatatctactttttatcatgctgtgataaacatcatgtatttcaggtactgattcttttttatacatcaaaactgcttcagatcagcagaactcagacacagtgtatgctgggacctcaatagtgtcagccagggtggggcttagtcatggttcaaagaaaaataaattgaaataatcgtatgtttttcttaaaatatgttaatattgcatgtaaaatcttcacatacgtgggataaacctcacttggccatgacatattatcctttttttttttttttggattaagttcactaaaattgtgttaagattttttgcatctatgtttatgaagaacacttgtatgtaatattcttgtagtgtctttggttttggtgttggaggaatgttggcctaataaaataatttgggactgttccctcctcttaaatattctgaaagagttttacagaattggtgtttttttaaattacatttatggtagagttgccgagtaaagtcatctgggattggagttatctctgtgggaagattttcaactacagtttactgatatagatagttcaataattatatataggaaaattccagttatctatttttgaaaaaccttctatggtttgatgttttaagtattatttattatttatttatttatgagacggagtttcactctggttgcccaggctggagtgcaatggtgcgatctcggctcactgcaacctccacctcgcaggttcaagctattctctcgccttagcctcctgagtagcttggattacaggcgcctgtgaccacacccagctaatttttgtattttttgtagagacggggtttcaccatgttggccaggctggtgtctaactcctgacctcaggtgatacacctgcctcggcttcccagggtgctgggattacaggcgtgagccaccgtgcctggccaagtaatttttctgtttcatcaaagtgtttgttggtggtgacataaatttgttccatataatttcttatttttaaaaatacctctacagtctgtagtgctgtcatttctctcatttctgttatcgataatttgtgtctacttttttccctaccctcgtcactcttgatagaatcaattttattaatgttctcaaaggatcaagtttttatttcactagtttttctctattgattttcatttttccattttaaaaaatttctgacttcattattacttttttccttctgcttattttgtgtttcatttgattttccttgtttttcttttttaatatggaaaataagattattaacatgaggtgtttttaaaattctaatataggttaccagtgctataaatttcccaccaaagtcttacttttgctaattcctacaaatattgatatgctctgtttttattttcagtttaatatactttctaattacttttatattattcctttctccattggttaattagaagtatgttagttccaaatattttgacatttccctgatatcatttacttattgatctctaacttaattccactgtgttcagagcacatgcattgtatgagttgaatcattttaaatatattgaaacttgtttaatgaacccgaatatgatctatcctagtaaatgtggcatgcacactagaaaagaatatttatctgctgttgttggatggagtgtactataactgaattttttcaagttggttgacttttgttcaagttttctatatctccactgatttgctatcttcttgactgtcaactaccaagagataagggttaaaatagcagattataatggtggatttgtccatttctcccttgcagttctattgatttttgcttcatatattttgaagttctgtagtaagctgcatagatatttatcattgttatgcatccttggagtgtttacccatccctttatcattatgtagtatcattactcttttgttttctttcttccttttttttttggagacaggttttcacaccgttgcccaggctggagtgcagtggtgagatcatggttcactgcagcctcaatctcctgggctcaagagattctgccatgtcagcctcctgagtagctgagactgcaggcatgtgctactgtgcctggctaatttttttgtttgtttgtttttagtagagacaaggactcgctgtgttgcccaggctggtagtatttctctttattcctcaaattttggtgattataaagtctacttggtctgatgatagtgtaattactccagctttcttttgggtattgtttgtgtggtatatctgttttcatttatgcttttagcctgtttatatattttaaagtgggctttttgtaggcagcatataattgggtcttgctttttgatccaatatgataacgtttcctttttttttgcatttcctttgttgttttcttacctctatttctttgttttattattttcgtggttgctttatcattatttgatagttttagtatatacctctagctttcactgtcaagttgcaagtaatattacatcacttcatgtgtattataagaactctgcatagtacacttcacttctctctcccctcctcatctttatgctactgttatcaaacattgtatatacatatacataaacatatacatatataaataaacctcacaatactttgttactatttttgctataaacagttgattatatttggaatatttaaatgaaaagatactttatatttactcacataattgccatttcccatgctctgtatttctttgggtagatacatatttctggctgttaattttcttctgactgaaggatgtcctttacatttttttgtaatgcaactctgttactgctggattttctcagctgttgtagccctataaatggctttatttcacctctgtttttgaaagatacttttgttgagtaaagcattgtagattaacttttttgtttttgttcttccctttcagtttcttaaagatcagctctattgacatctctgttgcaaatgtttataagaattctactgttatcattacctttgttttctgtataatgcagctttttctgttggtcacttataagatttacaatttatcactggttttcaatttattgctgtaaaaagtttattatgatgtgcctttatatggttttcttcatccttcttatgcttggaatttgtcgagcttctcaactctatgggtttataattttcatgattttttttaattgactattatatttgaaaatagctttttgttctcatcttcttctggaactctacttctacatatgttatatgcctaatatatactttgaagtcgccccatacttcactgatgctcattattgtttttaacttcctatttttgatagtttctattgctatgtacccaagacccctaccatttcttctgcaatgtctaatgtgtcttccatcccatccagtgcatttgttatttcagactatatagttttcatctctcatttgttttccatttctcaagaatcactgtccttctttgccagaaatctaaagtcttagtccatgatactacattttggccaggactggaaatttctcatcacctttaatgtatgtaatctttgccaaatgaattaaattctctctcaattttcttttaaaaaattgtaattacaaattagctatgtcaaaaaaagattgtttaaaaaataaggtgatccagaaagacagcttagtatattctttgaagcatcttaattagtaaaggctagtatcattaaaattaggaagtgatgcttggagtcattttaggcattgatactttattctatgtgatcagttcattggaagaatgaccctgggctgagggaatgcatataggccatgtagtatgagaaacaaacaagaacaagaaccaaggagagtatttgattatttggatcctagaatcttagactctcatctcagaagcaagattaggataagaacaggacatgggactagatgcccagtccatggcctgagcatcagtggtaaaacaggagaaaactacaaggaccaggtggatgctgtcagcttgccactgtactactggacatggtaccagatttttctgtgtgaaaacctggctcagcagtagatggggctgagctttcagtgtggagataactgtgtctacaatcaagagagtctgagaaagacagggattaaaaatattatttcttgctttatctatctatcttattcatttacatgaatgtccttcactattgtaatgatcttaaaaacaatgaaaccccaaagagtttacttcagcggaggcagagatgtgaataaattatggaagcttagggaccctcatatcccccatctcaaaaaaatgatactgcagctatgactgcaaaccaaatgcgattgcctttctttgtgttcacatgatgcctgaaatttactagatatgtttcttctctcatgcagcctaacatatatgacttgtaaaccagcccatgatatgtcttagttaggtaaggctgccataccatagactgagtggcttaaacaacagaaatttctcacagttcctgaagctgaaagtccgagatcaaggtttggcaggtgtggtttctccagtggtctttttccttggcttgtagtcagctgcttctctctgagtcctctcatagcaattctctatccacataccctcccgtgtctcttcctcttaaaaacaccagacctatcatataagggacctcttcttaggatctcattaactttcattacctccttaaaggtcctgtctccaaaaacagtcacattgcggggttagggcttcaacttgtgaattttggcaagggttgtgggggggcacaatttcataacatagtatgaggaataggtgtttacacagaatttgtctcctgaacaaaacttctatatccttatattgcagaagccaacactctggctcagaggtttatggaaagaacatttgctagaaggagaagggccagtatcttcactggtattttggacaagggtcttgtttggatatttgttatgtgtgtgtcttcaaagtgtgagaccttcggccacatccctcagtggctgaagtagcattctggattaaggaatttttaaaattaaattaaagttttaaattaacacatgataatagtacatatttacagggtacataatgatgtttcgatactatgcaatgtgtagtgatcagaccaggataattagcatagccatcataattcatattttttactgattggttggccaacatctctccaattcatgaatctagaggaacgtggtttatggacctctgctcctgtggactctgttcaagtccgtaaatggtttgagcaaggattgctcaatttctgttaacctcaccatagtcagggtttggggacctgtaactgccttggagtgatttcaagatgctgggccatttccagtcatctcttattctcacagaaacctcctggcatgcctggcacatcttcactcaataaaaccatttaaataaatgattgagcaaagaacacctattcaagtgtccatgccagaggggaagatgtaggagcatactagaagttaatgagccaggaatttaaagttttaatgtgtttgtccctgaagtttgcctcatccatgcttatttttagaaagccatagattctgttgctggcactcatttctagtgctttttttattgctgatcagttttaaaaagtaaaagcaagttcatgccaactatatatttcagccattttctgcatcctttgcctgcctccaaagcagaggtatacaggggagtggagaataaagccactggacagccgagggccatgtagtcccagagacagctcttccaggagcatggaagaaaatattaactctttccacttgtactgagatatttttagagtggcttcttttctctttggcttgtgccagggtgctactttattgaggagctgtcaaactttttaaaaaagaattatttctatacaagaagagtttccttgattctatatccattgtgctcttttataaaaatctcacttgttctgggaacttactaattaatagttacattgcaagtttttttttcttttgcctcaattacctaaaataagggtaaatgagtgctaagtttttttgttttgttgtttgtttggtgggtttttccttcttggtttttttttttttttttttaaagaaaaaaaagaattactggaaattacatttcaggggcacatgcctagtttgggacagattgaaataagaagacatccaaaacaggggttatagagcacacaacatgtatttccaagtaaaaaagcaaggctgtttttagatcttttgtcatattgagtcattgtaaagaatgagactaaatttattggccacataggataatctgtcttattccttcaaagaaactgctcaggtacatgacatttctgtctccaaaccaaatgtctaatgtgcttttatcttggcaatgtcacttaaatccccttccaaatcttttcttatatgtcatcatgtaaaatagactcctggaaaccaaaatggctactcaggaaggccacgctctaggcagttcatcacaggaagctggagctctgtgcttctggtcctatgctccctgagctgctatagctatggaccatggctaccacccaagggtttcccccaaaccatacctagcctctgcggtctgcctgaggtaggaatttcttagtgtgcattgattctctttcttccactttcctgatgacatttcattacagcaaagaaaatttttggccataaagattttccatatatggatcttttccaaaatctgtgtctgtagttaggaacaacttaataagaaggctcagtgttggcaccatttttaagaatatttatttccctgggctaatattcttttaaaaatactgcttcttaagggaaatgatacctgtaaaagaaaaattagaagcttctgaataaatttgaagaggaaagtcatgaaaaattataattatataaactttacactattattgctcttttgctatattttccggtcatttttgctatatttacctgatttttatagtcatgattacataatatgtttttctctctatttgtttaacattgtattataatcaggtttataatcaggttaacagatgcttcataaacatcacctttgacaactgcatgaaattccactgtatgactccaaatgtaatttactgaactgttctattaatggaaatttatgcaattttaatatttctattcatatagatatatggcaatacagatatttgaacaacattttttttctgatttaggatgttttctttagacagattccatgtggaaatatgaggtcaaaaattagaaatatttttaaacctttgataaatagcgttttccatactgtttcctacctcgttgtaagtacaagtttgtccacctggcttcctaagttggtcaacataaatttgcaccaacttaacatctgaaatataataatatacactgaggttcttagcataatttgtgtttcttttaaattggcattgctgatgacattaaccagtgtgactggggaatgattctgttgtccactgatccatttaatgtctcagttctggccatctagtggtctagtctgtgttttctactgaacaacatattgagcttttctctgctgcttcctggctttcatatttactgcagagaaatctcattgtctgcaatgattggacttttagaatagaatcttagtcatctgtattctacggcatgaaaactaggcccacactatttactactgacctgaggactcagctctgcctgcatgtagacctggaaaaacaccttctgcctgtgctcagaatacctgctggacctggtcactctctacccatgctcttttcctcaatgctttccttcctttcacctgttgtcttttcatcttctctctttttattcttggtctggcactcgtgcaagtagaagtgatttgatagcttcctcaggcttttcataaaaagggaccatttccatgcaagtgctatttttaccagtctcagaattgtgtaaaaggctttggttctgtgatattttctggaccacactataaaaattccctgatgctatagacccatgggttttactttaactcagtatttcctaaactgtgcttctgtggaatttcagttcaatttcaatgggagccaggaactaaggttcccatggtcaaataaactgcaaactgtgcttcctaaatggtcttcttgaagatttgcagttcatgttatcatatctaatggtttggagacatcagaaggaaaaaaaaattatgttttaacttggtcactccccactgaggaactattttttttctctttttattttttatggctatacctagagtcatttttccttaaaacccatctggaaaaagctggtttgaccatgcaacctgtttattaaagtggaccatggttttacatcaaggggaagatgtgacaaaaaataaacattttccagttttggagctggactgtgcacacatttctgttcagcagtattagaaccccttcaacatttggaaattataatgtttctgcagatgggaacaagctggatgccaaggagtgtgcatgagcgagagcagaggcccagcctgtgagctccactctgctctgctggcagtgatccagtgactacctaacagagagaagtggatagctttatgggcaattgtttgcccactggttgaaatgcttgggttggatttatcggaaccatggtcacataaagttgtctgtcacccaaagggaatcataaagatgccttgagtaccagagaaggatcattgatttctttggagccatagtgttcagcctctcacagctggggaactgctttgctgtgaaatagaatttcagttggatacaaaattaatcagttttcacagttcaaaattttgactaagacactgtgtcagtgtgtttggtacatgctgtgtttgagcctggaagcctacgcctcacatttgtgtagcatcgtgacaccaccaactgcctgttgatgtcatggggaaccagggtaatggggagcggacagtttctcctctgccactctagctctttctcccagcttgaatacagggctgacctttcacaaactaacacatctagaagggaccttagtgactattaatccaacactgaccaggggaagaaatccttttgcaacacccatgatcagccgctgacccaacctgtgcttgcatacttgtaataatgggggatccaccaccctacatggcagccctatggttagattttgaatgataactaggctttggtgaaattcctgtttcgtgaataaatcaaaaagaaggcaaattccatgttgtctcatctctctactggcatgagatcaatatcaaggagacaatcaatcacttatctttcatgtctctgatgtgatccatttgctatattttggtctcaaatgcttgggaagacagtagatagagaaagaaactgatacttatgatccaaaatgatctgccaaatccaatctcttgaggcaattaaattagaaggatatataggtcttcccaagaaacagaactaggcaaacataggcatttatatttggtgcaatatcctcaccctaacaaaaaaagaatgtttttctacttatatagctgatcacacagaaaggatcaacaatcgagtttttgaacataatttttcatttctcaaaaccctacttgcataaggaaaacagtctgttcacaaagagggtttcagttttgcagtgaagtgtaatgggaagaatatattcagatatgtttattaatcaagatctacccctgtctttttattctatattcgtttaggtggtccgtaacaatggggaagaaaagatgagcaagttatggcccttgtccttaaggagctcaggatctccccagtgggctgcaggaatggcaaatacccacaaaatagccgccacacaaggcagagagtgatacgtgttctactaagaatagcagtaaaatgctgaggaatcagagagatcaaggttaatgccaggtggaagactggggaaaagtacacagctgaattgactctgagttgcatgtgggaaaatggatgagatttcaaaaggcagagattaaagagttactgctacatggaggcattttcctagaatgtccctcagtataggaggcaggggctttcaaaactctgtattcatcattttctatagacatttttccttgtagtatgtcttgtcactgtatccatagctaaagttttggagatttgtatgcttatatcattgatgggattgttttaaataaatgtcttataatttagcaattttagttcctggagtcttttcacacttactgagaaatctacaaggtactcttcttggttcataggtaggtacccattgcattgacttttaattttgggtggagtctgagtgtccttattctcttttctcatggaaaaatgtcgtgccctggccagggaggaggaaaagaaaaacagcatactgctggatggctccaatctttctgtagtattgaagacagtgggagaaggaaagagagaaaaagggatgggagccgggggcggtgactcacgcctgtaatcccagcactttgggaggctgaggcgggcggatcacgaggtcaggagatggagaccacggtgaaaccccgtctctactaaaataattagctgggcctggtggcgggcgcctgtagtcccagctactcaggaggctgaggcaggagaatggcgtgaacccggaaggcggagcttgcagtgagcccagatggcatggcgtctcaaaaaaaaaaaaaaaaaaagaaaagaaaaagggatgggcctttcaatctggtgagtgcaagcaagagtcttgccatggtcagggatgtgtaaataagggcagctttctctcaatatggacattctcaatggacatttacattcattcattacgttttcctcgaagcatggaaggagtacatgctgtgtatcaggagttgccttttcaaagctcacagtctggtgaagggaaaggaaacatgtaaactggcatttgcaatgcaatatgataagggctatgacaaaaggaatgtggaattctgtgtctttgagggcagataagagagactgcaaataatagctctagaagacaatgtctgagccaagcaagaattaggtgagcaaaaagatgggcacctttttaaaaattatgggcatttagtgagtgattttataaagaaaatagcacattcattcatcttaattaagtttactttgcagttaattacgctgagtgaccttggggatatataagtatttgatacagacttaatatgaggtggatgcaaatatcactgataggtgagtgtgtgctgcaaaacgatacagagtccatctgtgtttgagtaatgataattatcaaatctcattggaagtttttcagttattgaatggaataatatgcagttcttctcttaataaaattaattcaagcatactttatattaaacaatatattttggaagaacactaccaacaaatttaccaaaacaaaaaaaataatgtcacagctctcaggaggtgccagcatttattgattacacactacatgttgttacatacattcatttatataattctcattttaaaaaatcttagctgatattgttggctactgcttacatttcatcctccgtggcctttacttcaactgaatttcagttttatgccaacaatcagcccactgtccttcacatggccgtgcatttgcttcatgaagctactcaggggaatgccaatattcagactgagaatgcttaagaggtgggcatgggactcaaatcttgttaatgaattaggagtgatgatgtttagatgtgatgcctaaaatcatggcagctatctgtgacaagggagcctagcctaaggatataaccaatgatggctcagcaggatatagccaatgatggctcagcagaatgagtcctttattttgggggatctaggtaagcaactatattagacaacctaggaaccctttcctactaaacgaggtaatgttattttccttcagatttaagccatttgtgttgagttttctgaactctcagccaaaatcattctcattgacaggtaggtactctcattatctccattttacaaatagggaaattgggggttcaataagttaagtcagcacttttggaggctatggcaggggatcacttgagcccagaagtttaaggcagcattgagccatgatcatcatgccactgtacttcatcctgggcaacaaagcaagaccctgcttctcaaacacaaagaaaaacaaacaaaaaaaagaagttaagaacttaatgaacatcatgcagctggtaaaaatatcagaattaggatcaaaatcaagtctgtcttacatcaataccctagtggttaatttgtggttagacatcttctacatatattttttgaaacatatcacactaaagcactgaaataaataatgacaaaaatgtctagtaattcaaatatataatctgtgagaaagccactttccccagtaatgttttatatcaagtgttggtaaattgtgtaaggggtcaaataataaatattttagagtttatgggtcagatggtttctttcacaactactcaactcattgcagctcaaaaagccatagacaatgcataaacagatgagctcagcactgtttcagcaaaattgtaattacaaaaacatgtggcagaccagatttgggcctgggaccatagtatactgaacacttctctacatgaactaaatctgattctttgtgaagggttcgccagggaggatgggcaaaagctcattttactaggtgtgtaccaaaaaaaaaagtcacaccagtagaagagaaaaggagatatggagtgcagtgtggaagggacagagagtgcaccctcttcacaaactttaagatatcaaagaaaatgactgttttcctactttgtagtgcagattgggaaacagcttcagacaacacaaaaggaggggagctcatggcttccaccatcagagaggcaaagttagatagtagatttctagcctactatctgtgcttaaattggaatttctgttaaaaattccgaattttctcagcaataactttcaaagaccaccacaccattatctttctttctttcttttcttttcttttttttttttttttacagtcttgttctgttgcccaggctggaatgcagtggtgcagtcttgggtcactgcaacttctgcctccctggttcaagcgattctcctgcctcagcctcccaagtagctgggattacaggtgcccaccaccacatctggctaatttttgtatctttactggagatggggttttgccatgttggccaggctaaagacaaccgttatctttcatactcaaaatattgaatgacccacaagcagtataatacatagctgttatttctgcaaatggagagataagaattggaagtgaacagatggttatagctctttgatttttgttttaattgctttccaacaatcacagagaatggaccaattttctcaataatatttgttctgaaacaaaggtctgggagtcaagtttgtcaataaggcaaagagtttttgggaggtatgtgagggtttttctttttttttctcaaatggtttgcaaaggcataacatgaaattgactgttatttatttgcagaatcttaactactgagccatatttgtccccttttacttcttactaaactggaaacataaaaaagggtttataggaaaccaaggttaacagataggaacataaagtttcactcttctttcctgcttctggcaaccactaatttattttctgtctctgtggatttgcctattctggacatttcctataaatggaattatgtaatatgcagacttatgcctactgtctttcactgagcataatgctttcaaggttcacccatgctgtagcatgcatcagtaaataatgtcttttattagtgaataatattccattggatagatgtaccaacttttttgtttattcatcacttggtggacaatggagttgcttccactttttggctactatgtgtaatatttctataaacactcataaacaagtatgaacatttgctttcaattctcttatgtgaggagtggaattgcttggtcatatggtaactctaacatcttgaggaatgatcaaacttttctgcagaagctgcaccattttactttccccagcattgtatgactattcctatttctccacattcctgccaatactcattgttgtccgttctaatgggtgtgaagtgatatttcattgtagttttgattttactttacataaacactaacaattttggacatctttttatgtgtttgttggatgtatgtatatattctttggaaaaatatctattcaaatagaaaggaaaattttaaagaagagaagatgtatgataaaatttatattgactgcatgtctataatgcattggggtctttactcataaaaatgaataataagtaatattttaatcatattacataaataagattcagataaattaagaacttgctaaagaaaatagttggctatggttaagccaagagtcaaataagatccgcacgccttccctttgtcccatgtacatatgcttcatgtgcatcgatatgaagatgtacatcttacagagatgaataagacaaacatgactgaataaagcatgagtgtgcccctctcctctctggaaaaaagtaaaaacataaaaaacttttatggaataatgcagaaaaggatcaattctctttctgatgtcaatatgatagtaaagttgtaggtagtgcacttgtgagatcatcaccttactagtgattgatgggggcatcccactctttattgatctagtctatgtaatagcacatgagaaatccatgaaccgccctgtggagggcttatttatcttttaaaatgctataaccacatccagtatctctaaacaagtgcttagaagttagaaaacattatgagtatattagccacctagacaccactctcccctgcccagcacttagcagagtgtagattgggtacatgacagtcacgcatgccttgttgctcctgggaggcagacttgccttattatctgaactgatttcctcactttccaccccaggaatcaatacagtactcagcagtcttatattagatgctccatgatagattgttaaataaatgactttaattggcatcatacagcgatattacagaattagatatacagttgatgctcaataaatatgtgctgacttatttagtaaagaaaggaaagatgtgcttggtgccaagcactgtgaaaatcccactaccacacattgtcttcttttctcatttaggcttcgtgaaaccccatgaattatatgctttcatatattcaccttattcatgttcaaaatgccagcaagtagtaaagtagtaatgcaaacccagatctgcaaaagtacattacaaagcattaagttggatatttagaactcggcacactaaatttcatctggggctaaaacacagagtcccaatgtagtaccaagaaacaagcctttcccacttttgcttaagatgacaccaacactgccatgaagaagatgaacaggggtgcacaggatgatacttcttcaaataagtgaaatgattgatgtattgggtactttatgcaagaagatttggagaacaatgtaattgttttataatctgattgcgtatccctaagacctggatgttttcaaaatgataaatgacttaatgactgaatacattctagttgcctgttttaaacaaatgtgacattttaggggttaatgctacattcttgatttcctgtatttttagtcagtaactgtattagtctgttctcacacagttatgaagaaatacctgagactgggtaatttaagaagaaaagaggtttaattgactcatagttccacatagctggggagtcctcaggaaacttacaatcacggcggaaggcacctcttcacagggcagcaggggagagaatgagggccagcagaagaaacgccagaggcttataaaaccatcagatcttgtgagaactcactcactatcacgagaacagcatgggggaggctgcctccatgatttggttacctcccaccaggtcctttccacacacggagattatggggattacgattcaagatgagatttgggtggggatacagccaaaccacttcagtaactttctctctgtttaaaaatttttaaatttctattttttttaaagtttgaacatgttgaggttcaaatgtcttaagcttccaagtgctcttttgacttttaatatatttctggagtccctttttgtcttcttggtccttaacactttggttgcatgcctgcatttcctctcctgcttgtgtgcacttctcatctgccatgtctaggaagttgtatcctttccacttgatttagcatttctttatcttctgtcgtgcagctatcaatatgccatctagggtgggggctggagatataagacagcttaaagatatcatccttttacttaaacaactatccatcttttaaagtactttaatataattttcataacttttccggtcagccagagtgaatactctcgaaagtgtctttgacagttggctttattttttgaggaggaaacttctcttgattgactttgtttgcaccgtgatttgcagacaagatactaagaatatgggggtggtggttggggctagtgttagagttagtcctgttataatctcagtttctcaacccatccaaatgagaacaccatagaagtaaaaacatatttcctatgcaaaggctgcattaagatatgtctagttcccacctcaacccactctctaagtctttcttgcataaaatgcggagccaccacaccactactgacaaaagtgccctctccacgaactctcctagaatattttttctacttctgccatgacacttgacatagttagccaatgcataagcagggcttcaagccaggctcttgtgttgcaatatctatcctttctttataccccaggtggagaagaaagtgcttggatatctgaacactagaataaatgattcaaataagagctaaaactattaaggggaaaaataagatttttaagtaattaaagtgagtgatattcattttcatgaaggaatctgaagaatcaagtcaatgtttagacattaattcaaagccatgatggaatgaaaagaaaatgtgacagagaaagtaatagaaattccctgagtcaagcactgtctttatttttgcactcacctacctccccccaatatctactttgcacagtattttagtgtgtgctcaaaaaaatgggtgttgggtgcttgctttggcagcacatatactaaaatgggaacaatacagagaaagttgtcatggccgtgcacaaggatgacatgcaaatttgtgaaacgttccctatttttatggttaatgggtacaaaaaaaaattagaaaatgtaagacctattttttgatagcacaacagggtgactatagtcaataataattgtacactttaaataactaagagtgtaataggattgtttgtaacacaaagtataaatgcttgaggagatggataccccattttccatgttgtgattattatgcattgcatacctgtatcaaagcatctcatgtaccccatgaatatatacaccagctatgtatgcccaaaatttaaaaataaaaaatatttttaacattggtgttgggtagatgggttccaagatgaatgaactactaaaaaacgatgccttctaattgctcttatttacttattctggagtgataaatagagtgtttggcaaggagaagcttgcatatgtgtagcttaaaagagtccaaaactcagcacggttggaaatgcagaatattaaagagatttctttatggagttgggcttttttgacttttccttgcctttctatggatgaggtgtgaaataataagactgttgtgtggtccctccatagttcagtttcatttctgtaaaatgaaaatgatatttatattggattaataggtttattccaagcattattactgcatgctgacttctaaagtttctcttatcccaaggttgttggtttgaattgttaaaactataagtcctaagaacagatttatttattttatatgtatatatctgttttatttttatagatttagggagtacaagtacagatttcttacattaatattttacatagcgttagagtctgggcttttagtgtactcatcacccaaaaagtgatttggtaacccaataggtagtttttcaaccctttccttcctcccaccttcccatcttttgtagtctccagtgtatattatttaccactaaatgtccatgtgtaccctttgtttagctcctggttataagtgagaatataaagtattttactctgtttctgagtttactctgtttctgagttattttacttaggatcgttgcctccagttcctgttctattgatctgtatctatttttataccagcaccatggtgttttggttactaagccttgagagtcctagatttcataaaatggtatgatttcttttttatggctgagtagtactttatggtatttatggtatatggtatttctggtgtgtgtatgtatatatatcatactatatgatatatatatatggaatatggtatttatgttatatatatgcacacacacacactcattaatcatccattaatgaatacttaaggtgattctatatctttgctattgtgaatagtgctgccaaaaatatgcaagtacagatatctttttgatataataatgatttctttcccattgggtatatactcagaagtgggattactggatcaaatggtagttctatttttagttcttggataaatctccatactgttttccataaaggttgtagcaatttacactgccatcaacaacgtattagcattcccttttctccacatcctcacaatatctgttgttttttgactttttaatattaaccattctggctggtgtaagatggtatctcactgtggttttaatttgcatttatctgatgattaatgatgttgagaatgtttttaatatgtttattggttgcttgtatgttttcttttaaaaagtgtgtgtttatgtgttttgccccctttttaatagagttatttatttttcttgttgagctgtttgagttccttgtagattccggatattagccctttgtcagatgcatagattgcaaatattttcccattctgtaggctgtctgtttactgtatttatcatttattttgctttgtagaagctttttagtttaattaactctcacttatatatttttgtttttatgatgtttgtttttgaggacttggtcataaattctttgcctaggccagtgttcagtaaagtttttcctaggttttcttcaaggatttttacagtttcaagttttacatttcagtctttaatttcatcttgagttaatttttgtatatggtaagagatatgggtatggtttcatccgtctgcatatggttatccaatttttccagaaccatttattgaatagagtgtcctctccccagtgtatatttttgttgacttagtcaaaggtcagttcatcataggtatgtggctttatcaaatctagggctctcaatgctgtagtaaccaaaacagtatggtactggaataaaaaaatagacatatagataaatggtacagaatggagaactgataaatgatttcagtaaagtttcaggatacaaaatcaacaaggaaaaatctgtggccttgctaaacaccaataataataatcaagctgagaaccaaaacaagaactcaatcctatttacaatcgttacaaaaaaatacataggcatacatttaatgaaggaagtgaaagatctctacaagcaaaactacaaaacactaatcatagatgacacaaacaaatggaaaatcaccccatgctcatggatttgaagaatcaatatcattaaaatgactgtactgcccaaagcaatgtacatattcaacaccatttgattacattaccaatgtcatttttcacaggattagaaaaaaaatcctaaaattcatgtggaaccaaaaaagggctttaatagccaaagcaatcctaaacaaccagaacaaagctggaggcatcgcatatctgtcttcacattatactaaagacagatttataccatgagagtagacctgatgtacagcagtgcacttcactaattgtattgactgttaagaaattacaataattttattctatatggtaactaaccactgctcaaatcccccctgaaaattgtccccccaatgccaccctggatgcctgggttcccaaatctcctcagtgttaatccagaaacaagagttaacatttagccccagagggacctccaggacgctgcttctctcttatgaccgtacagatttattctgattagtcctgtaatttccatatgacttattaaatattttgaacatcacatccatacatactttccagacaagaaatttggatgtgggagaacattctttaataaagaaacacataaattctcatttaaaaaaactgctttttttttctttcttttttttttattatactttaagttttagggtacatgtgcacattgtgcaggttagttacatacgtatacatgtgccatgctggtgtgctgcacccactaactcgtcatgtagcattaggtatatctcccaatgctatccctccccgctccccacaccccacaacagtccccagagtatgatattccccttcctgtgtccacgtgatctcattgttcaattcccacctatgagtgagaatatgcggtgtttggttttttgttcttgcgatagtttactgagaatgatgatttccactttcatccatgtccctacaaaggacatgaactcatcattttttacggctacatagtattccatggtgtatatgtgccacattttcttaatccagtgtatcattgttggacatttgggttggttccaagtctttgctattgtgaataatgccgcaataaacatacgtatgcatgtgtctttatagcagcatgatttgtagtcctttgggtatatacccagtaatgggatggctaggtcaaatggtatttccagttctagatccctgaggaatcgccacactgacttccacaatggttgaactagtttacagtcccaccaacagtgtaaaagtgttcctatttctccacatcctctccagcacctgttgtttcctgactttttaatgattgccattctaactggtgtgagatggtatctcattgtggttttgatttgcatttctctgatggccagtgatgatgagcatttttcatgtgttttttggctgcataaatgtcttcttttgagaagtgtccgttcatgtccttcgcccactttttgatggggttgtttgtttttttcttgtaaatttgtttgagttcattgtagattctggatattagccctttgtcagatgagtaggttgcgaaaattttctcccattttgtaggttgcctgttcactctgatggtagtttcttttgctgtgcagaagctctttagtttaattagatcccatttgtcaattttggcttttgttgccattgcttttggtgttttagacatgaagtccttgcccatgtctatgtcctgaatggtaatgcctaggttttcttctagggtttttatggttttaggtctaacgtttaagtctttaatccatcttgaattcatttttgtataaggtgtaaggaagggatccagtttcagctttctacatatggctagctagttttccaaacaccatttattaaatagggaatcctttctccattgcttgtttttgtcaggtttgtcaaagatcagatagttgtagatatgtgacattatttctgagggctctgttctgttccattgatctatatctctgttttggtaccagtaccatgctgttttggttactatagccttgtagtatagtttgaagtcaggtagtgtgatgcctccagctttgttcttttggcttaggattgacttggcaatgtgggctcttttttggttccatatgaactttaaagtagttttttccaattctgtgaagaaagtcattggtagcttgatggggatggcattgaatctataaattaccttgggcagtatggccattttcacgatattgattcttcctacccatgagcatggaatgttcttccatttctttgtatcctcttttatttccttgagcagtggtttgtagttatccttgaagaggtccttcacatcccttgtaagttggattcctaggtattttattctctttgaagcaattgtgaatgggagttcactcatgatttggctctctgtttatctgttgttggtgtataagaatgcttgtgatttttgtacattgattttgtatcctgagactttgctgaagttgcttatcagcttaagcagattttgggctgagacaatgcggttttctagatatacaatcatgtcatctgcaaacagggacaatttgatttcctcttttcctaattgaataccctttatttccttctcctgcctaattgccctggccagaacttccaacactatgttgaataggagtggtgagagagggcatccctgtcttgtgccagttttcaaagggaatgcttccagtttttgcccattcagtatgatattggctgtgggtttgtcatagatagctcttattattttgaaatacgtcccatcaatatctaatttattgagagtttttagcatgaagggttgttgaattttgtcaaaggctttttctgcatctattgagataatcatgtggtttttgtctttggctctgtttatatgctcgattatatttattgatttgcgtatattgaaccagccttgcatcccagggatgaagcccacttgatcatggtggataagctttttgatgtgctgctggattcggtttgccagtattttattgaggatttttgcatcaatgttcatcaaggatattggtctaaaattctcttttttggttgagtctctgcccagctttggtatcagaatgatgctggcctcataaaacgagttagggaggattccctctttttctattgattggaatagtttcagaaggaatggtaccagttcctccttgtacctctggtagaattcggctgtgaatccatctggtcctggactctttttggttggtaagctattgattattgccacaatttcagatcctgttattggtctattcagagattcaatttcttcctggtttagtcttgggagagtgtatgtgtcaaggaatttatccatttcttctagattttctagtttatttgtgtagaggtgtttgtagtattctgtgatggtagtttgtatttctgtgggatcggtggtgatatcccctttatcattttttattgcgtctatttgattcttctctctttttttctttattagtcttgctagctgtctatcaattttgttgatcctttcaaaaaaaccagctcctggattcattaattttttgaagggttttttgtgtctctatttccttcagttctgctctgattttagttatttcttgccttctgctagcttttgaatgtgtttgctcttgcttttctagttcttttaattgtgatgttagggtgtcaattttggatctttcctgctttctcttgtgggcatttagtgctataaatttccctctacacactgctttgaatacatcccagagattctggtatgttgtgtctttgttctcgttggtttcaaagaacatctttatttctgccttcatttcgttatgtacccagtagtcattcaggagcaggttgttcagtttccatgaagttgagtggttttgagtgacattcttaatcctgagttctagtttgattgcactgtggtctgagagacagtttgttataatctctgttcttttacatttgctgaggagagctttacttccaactatgtggtcaattttggaataggtgtggtgtggtgctgaaaaaaatgtatattctgttgatttggggtggagagttctgtagatgtctattaggtctgcttggtgcagagctgagttcaattcctgggtatccttgttgactttctgtctcattggtctgtctaatgttgacagtggggtgttaaagtctcccattattattgtgtgggagtctaagtctctttgtaggtcactcaggacttgctttatgaatctgaatgctcctgtattgggtgcatatatatttaggatagttagctcttcttgttgaattgatccctttaccattatgtaatggccttctttgtctcttttgatctttgctggtttaaagtctgttttatcagagactaggattgcaacccctgcctttttttgttttccatttgcttggtagatcttcctccatccttttattttgagcctatgtgtgtctctgcatgtgagatgggtttcctgaatacagcacactgatgggtcttgactctttatccaatttcccagtctgtgtcttttaattggagcatttagtccatttacatttaaagttaatattgttatgtgtgaatttgatcctgtcattatgatgttagctggttattttgctcgttagttgatgcagtttcttcctagcctcgatggtctttacattttggcatgattttgcagcagctggtacctgttgttcttttccatgtttagcgcttccttcaacagctcttttagggcaggcctggtggtgacaaaatctctcagcatttgcttgtctgtaaagtattttatttctccttcacttatgaagcttagtttggctggatatgaaattctgggttgaaaattcttttctttaagaatgttgaatattggcccccactctcttctggcttgtagggtttctgctgagagatccgctgttagtctgatgggcttccctttgagggtaacctgacctttctctctggctgctcttaacattttttccttcatttcaactttggtgaatctgacaattatgtgtcttggagttgctcttctcgaggagtatctttgtggcgttctctgtatttcctgaatctgaacgttggcctgccttgctagattggggaagttctcctggataatatcctgcagagtgttttccaacttggctccattctccccatcactttcaggtacaccaatcagacgtagatttggtcttttcacatagtcccatatttcttggaggctttgctcatttctttttattcttttttctctaaacttcccatctcacttcatttcattcatttcatcttccattgctgataccctttcttccagttgattgcatcggctcctgaggcttctgcattcttcacgtagttctcgagccttggttttcagctccatcagctcctttaagcacttctctgtattggttattctagttatacattcttctaaatttttttcaaagttttcaacttctttgcctttggtttgaatgtcctcctgtagctcagagtaatttgatcttctaaagccttctctcagctcgtcaaagtcattctccatccagctttgtttcgttgctggtgaggaactgcgttcctttggaggaggagaggcgctctgctttttagagtttccagtttttctgttctgttttttccccatctttgtggttttatctacttttggtctttgatgatggtgatgtacagatgggtttttggtgtggatgtcctttctgtttgttagttttccttctaacagacgggaccctcagctgcaggtctgttggaataccctgccttgtgagatgtcagtgtgcccctgctggggggtgcctcccagttaggctgctcgggggtcaggggtcagggacccacttgaggaggcagtctgcccgttctcagatctccagctgcgtactgggagaaccactgctctcttcaaagctgtcagacagggacatttaagtctgcagaggttactgctgtctttttgtttgtctgtgccctgccctcagaggtggagcctacagaggcaggcaggcctccttgagctgtggtgggctccacccagttcgagcttcccggctgctttgtttacctaagcaagcctgggcaatggcgggcgcccctcccccaacctcgctgccgccttgcagtttgatctcagactgctgtgctagcaatcagggagactccgtgggcgtaggaccctccgagccaggtgcgggatagaatctcttggtgtgccgttttttaagccagtcggaaaagcgcagtattcgggtgggagtgacccgattttccaggtgtgtctgtcacccctttctttgactcagaaacggaactccctgaccccttgcgcttcccaagtgaggcaatgcctcgccctgcttcggctcgcgcacggtgcgcgcacccactgacctgcgcccactgtctggcactccctagtgagatgaacccggtacctcagatggaaatgcggaaatcaccgtcttctgcgtcgctcacgctgggagctgtagaccagggctgttcctattcggccatcttggctcctcaaaaaaactgcttttttacacggaacccacgaacatgaaaaaataaaaaaaccttgattattagcctcaggtatgttcacaaaagtatagatatgtttttcatcattcatttccaaaaacattatcagagatttggagcaaaaaggtgctgttaccttatcattctgaagttttgtgtatgcctatgatgttggtataattttcattgttacaaccattatgatacttattcacagaaagcgtgcattaagcacttattgtgtgtcaggctttgtaataaattatggtgatacagagactgacttgctaggtccctaagatcccataatctagtttgagaagagtatggagaaggaacatgtaagcagttaaactgcaattcagagtgatcatcacagtattagagatgaacaggaagtgtgcctggagctctgaatactttcagccacttctaacctgaggagctagggaaaacttcagtatgtgcttacatttcacataaatctgaaacaattagaaattatttgttagagacatacatgtagctgtgtatgaggtaaagggaatagcacatttaaattcatagagtctaaaagtcgccatatgtgttccagtattattggagctcaagaaatgtgggaaagagactaggaagtgcagtcccagggagccttctctgatggcttgtgtggggaattgctgaataagctagaaagggtttatcaatctcgtgtaatgaagactcaatggagttttagccacaatatggagagctcacatgtgctattgaggtggttgtgttaactcttcttttttttttttttagatggagtcttgtgctgtcacccaggctggagtgctgtggcgcgatctcggctcactgcaagctccgcctcctgggttcacgccattctcctgcctcagcctcccaagtagctgggactacaggcgcccgccaccatgcctggctaatttttttgtgtatttttggtagaaacggggtttcaccgtgttagccaggatggtcttgatctcctgacctcgagatctgcccgcctcggcctcccaaagtgctgggattacaggcgtgagccactcgcacccggccgtgttaactcttagtaagtagtagaagccagtgtgaggtacagggagaccagacaggaggctgtttctatgtgtgagaaacttttatccactagaagttcatataaagacacatttgggaaataaagttgttgtagagaaagatacaccatccccaccgtggatagcatccagattaatgctggaaatcacatttcaattagaaaattgcttaggaaacatgatgtcagaagaaggagagccatgtaattcaagtctttggtggcatctctttcaagtttcccagtgcacctgactcagaagatagaatcagtctgttagctgaggtctctctgtgctggagaagcatgaaaagggccccaccagcatagactcagttctctttgaagtttaagatccatctacaaatggccatgttctttccttagcagaaggtattggggtttctacatacatgctactcactgctcacgtgtaagtaaggtaaaatttgagcaagtggaaaatgaccctgctgtaatccagatcataatatttctaaataagcacacacaatagtcaaccaacctacttcatgatcttttatggaacaaggcagagacaaggccactctgcacccacaaaaatgtataagtatgcacttctgacctatgtgaggtaagtgtctgctacttctctgtcaatggcaagccctactaccgtcctccagcatattggatttgtaggccactcagttagcaattgtcttcacttctacatagcattcaatccttaatgtactcctgcttttcttagcctatagagtagttcaaactcccagggaggctgttttgttagaaggaatgaagtcactatggatatattgaaaatctcatctacaatagttaaaagtccataatttagggttagtgtgaggatattcattcaataagtatttactgaataactattggatagcaggtgatgagttagttattaggaatacatatacccacatacatgcacaaacacacacacacatacagacacatacacagatatataacatgtttgtatcttccagaagcatacggtttatgggataaacaaagggagataatgaaggttattatttctagtagcaagtttgagaatatcccatagggtgaggctcatttttgttagactttgataaatcatctcaaaggctaggcctcccagacgtgtgtgttatctgtggctcaagactatgagtagcagtcatagctatgattgaaagaatgagagacaaagagcagaaagagtggggagtagttctgtgacctaaatggtgaaaaggccccagagaagaaagcctttactgggcaacactatagagagttttgtagagaacagaaatatccaatgggaatttattttttgctaaagttttctctgtcttataatatgttatctggatgaaatctgtggacaactgtgggattgtgggggtgcaaggtggcaacctgcagagcaaagcatgtgcaaaggcctgaggggacatgggaaatttaaacaattgtggcttgtgtattgaaagtggggggcagttattatgtatgagatgaggagtgagagacacagagggcttgggaagattttggtcttcatcgtaagagccgagataagccatgacatgattttttgaacagcagtgactgattgctatgtggtttttttttttttttgcatatattatggaaacagattttattgtaaataattcattttagggtgggtagcatgtgcacagacaggtctgtaaggaatattccaggtaagatgagatggaaagaagtggtaaattcaaaagatatttaggagttagaatcaagagtatttggtgattgcgcatgcaggatcaagagaatggctactaggtttctggcctggacaatgggatcagtggtgtcacattaactgagactgggagtgctaaagtgcaagtttcttgaggaagagcaagaattccattttctataagcaaattctgagctgcttttgggatgtccatcaagaggggaaagataagcacagtgtgctgcattgtgccagcaacatagaaacctccgtaagtaatattcaggttcaactcagtagttaatattcaggttcaactcagtagttaaggaagaaaccagtcatcgtttcaattcattaataaattaactttcattgcaaaatctgtggggatttctgtcttccaacccaacattttcttcccattttgcctttaatgaattcaccaccaccacctctcactgtgcatttaattactctactgattacttactatgtatgctacgtgatgtggaaagaatagaaaacttaaaagcaaagcactctccctgacctccctggggatagagaccgaaacgtataaaaaaaataagaaaacacattaaactacatgtaacaagtgccagatgagtgatccagataattgcacagtccctgtggcccctagtgatggggtactatttctaatgccagcagcagtgcttccttaaactgatccctagaccttggtcatggtgcttggaaaaccctttcttagcaccatctctgctcatcttaatcctaacactcctttattcttcctgtccctctttttttggaaaatcctttccaattgttttgctttgttttcttctcgtttgtcctctatgctgctgggctgatttttccctcctttaatgaaattccatgctctttctctaagttgttttggagcccttcttatatcctaacttacttcgcttcccagaaatttttaaaatagagtttttgttcactataacactttttttttttttttttttttttcctgttttgagacagggcctcactcagccctgtctcaaacaggctggggtgcagtggcgcaataccagctcactgcaacctcgacctcctgggctcaggtgatcctcccacctcagccttctgagtagctggggtcacaggcgtgcgccaccatgcccaaataatttattattattattatttgtatagatgggggtctccctatgttgtcgaggctggtcacagactcctgggttcaagtgatcctcccaccttggctcctgtagttctgagatacaggtgtgagccagagtgcctggcctgtgataccactttttaacacaaacaattagaaaaatgctgtataaaaaagttgtccttttttttttttttgacagagtttcgctcttgttacccaggctagagtgcaatggcgcaatctcagcccgctgcaacctccacctcatgggttcaagtgattctcctgcctcagccttccaagtaactgtgaatacaggtgcctgccaccatgcctggctaattttttgtatttttagtagagacagggtttcaccatgttggccaggctggtctccaactcctgatctcaggtgatccacccatcttggcctcccaaattgctatgattatggatgtgagccaccgcgctgggccaaaatttctcccttctgtaaattcctattccgtgcctctgtgtcatgccatccataagcccaaggattaaagatgtgaagacctgctctgctcagtggaagcaagctcatggtccagtcagacagtcagatgggagcttcagaagctgatggatgtggagagaatgatgtctgatagcagggcccactctgaaataagggaacttaaagaaagccttgaaatacaaattggtattcacgggaacataaggcccctcctgtttacttacaggaaccttcatccatataattgttttgaaggcaatagctctataacaaattatttaccaaattacattcctagaaacagaagtttgattaagtacatgccaaaatagtaccatatagcatagccagcttagtgtattggactgtcttaaaagtggcatagctttaaaaaatataaacaagcttccaaaagtgttgaatttgctcacagatgagagtttttgattactaagatacaccaaggttgtttaggatcataacttttatagtttggcattagatcttatccatgttctcattctcacaaatgttccgtgtttcttcttcagaataaaacactcagctggatacattagagcacactgtgccaccttagggcacagaaagaaaataaagaattgcaccttacattttatttttggctcattcttatttatgttctattttatgtgttttgtagtgtatcttgtatgttgaaaattaaacaaatagatgtatgaatacatacatgaactttaatcagatgtacaaatgtaggaggatatcatccaaaattattagcatctctttagtaggctttgtttggttgtaagtgatagaaaacctcagtaagagtgacttggacacagtatgcttattatttagtcaagaaaaatctaagtaggtggtcttagagttagcgtagcaacctcgtgagtttattaagggtccagaatttgcctatatttccatacacatattttgcatgatgactttcaagaataaaatttcacctcatgatgaattacacttaccttagccaatgcctctgtgatttcaggtgggtaatactatgtagataatatatagtaaaatgcataggtatattctaaggtttcaaatgtattgataattgcagttatttacttagagaatgatcatacccaatattttattattgtttattatattgtcattaaaaagttataataatgttgttttctttgaattcagtaaagtcattgtgaaggttaagcatgtgcattttaaattaatttggagattctttaagctatggaaatggaaagcctcagtacatgttaagcctgatatctgagctttcccaccccagacttttgcagagccattgacttgggtctctgatcctctgtaatgtgctgatagatgataacatgatggagaaatcagttggtagaatggggcggtaaccactagagatagcagttgtcagatggaaattaattgattgtaattgctttgccattgtattgcacttgaagtctgtagcttgttaaaaccactgattataaaataaggatctcactttttatgctgtagattatgttaatgaaagctgttcttagaagcatgatcagtgaatatcaataaatggataataagaaattaaaggaaaagttaactaactgatcatgagttaatatacttcagcagccagagtagcagtcaactgtgcaccgtttcatattgaattttttgctcagagctcttgaattttaaatatttcccatagagagattgattctgtgtgactgtttatcacgtactgtcttgaataacagatcttttctgtagagaatctcctgcaagatggaaaatgtgtgtgttttgcagagcctttattttgtgccaaagtattaacaagcagatattttgaaatggaaaacataagttcccattgcaataccaatagtggtttatttcagtgctcgtggaatatgagtaacatatgtgtgagggtctgtgtgaatctgaaggccttgctgttgcaatctttatcaatattataaaaagtatactaaaatgataacataaatgttaaattatacttcactttttgctgtacaaaatgcgttaacttttataaaattataatgaggtttttaattatagctttcatttatagcatttaattgttgatgttagagagatcagagattttggagatatttttctgaacaccagttctcattaagcctccatgcaggccctcaaggaccttacagaagaaaggaacagataaaacaaagaaaggattacttgcagtgttgaatgcagtgatgaaagtgataagaggcactgggaggcacaagatgagatcatctaagttctgaggatttctgggtgtcttcaacaaagaatgaaggtctgggaagaaggagcagtgtgacagttcttggtattttggggaaatagaatgatagttgaaaattaagttgcataaagttttagagtgcaagaagagaccagacagataaacatatagatggcccatgccctggtttgccctactgtggattttaaagttattcccacaggagagcccatgaggatttttagatgtgggagagacaggggtgagtttccttttaaactgctcgctcaccatcagttgtgacgataatcagggaagaagctcattgtgaccttcatttactgtcttagtccattttctattgctttaactgaatacccgaagctaggtaatttataaagaaaatacatttattttttgcagttttggaggctgggaagtctaaggtcaaggggctgcatctgctgagggcattcttgctggcaaggactctgcaagccctgaggcagtgcagggcatcacatggatagggagtaagagcatgtcaactcagtccttctttctcttcttgaacagccaacagttccatcatgggggcctcaccctgatgaccttatccattcctgattacctcccaaagggccccatcttcaaatatcatcaacatatgattttgaggattaattttccaacacatggaatttgggagacacattaaaacaagagcggttaataagctggtataatatcccatgcttgaatattattattaatctaaatctctgtaaaggaaattaaaagcttaagcattgaataattttttcttctttgactttttaagtatattttttgttgaatgttgtggtggaattggagctaatagttgcttaaaactctgtaattggaacaatgtctacatgtggtaatagagtctgtatcttatagatagcacttatttattgttattctcatatttgggatgcagatattgatgtataacttaatttgaaaatgtaagtaattatgattttaagaatgcatgtttaagatatgctaaaaaatggcaataattggtcctgttaaatatttaccagaaacattcttcatatttgagaatctgtttcagaatttagaacatttgcattttaattacataataaaaggagaaagtgaaagaataattggcttagctattagccaattatagctgtaactgaaaaaaaaatcccccaaactgacattggattccacagaacagtcacaatatacattgatcagatgtttaattatatttggcagcaataaagggaagggaatgttgtttcaatccttcatacaacatgtttgttaaaactgaaattaatgagggtggatttggggtgtttgacttaggatcattcagcttttagtgtttacttgtccacaaatggggcttctccagagtgactccaatagataaaatttagtggagaaataagacaattgaatatagtggttacagccagctgcatttggtcagtaccaaggagggttggagctgtctgtctagagtcccagaggtcagagcccatgagaaggcctccatacagagatccagagccagtgacaggagttgttggtgtcagaatgtactgctgacagcgtttccccctgtgctttccctgacagatacgacgacatattccacagagcgatccgagcacttcaaaccctgccgagacaaggaccttgcatactgtctcaatgatggcgagtgctttgtgatcgaaaccctgaccggatcccataaacactgtcggtaagccactgaggccactgatggaaagggcaggcccgttgcaaggcgtgggggtggagggtgctggcagcatctggtatgtgtcatatccgggatacacacagtcccaccgtttgaatagcagaattgcgagtcttaatttggaaagggcaaggctgctgcctctttaacagtggaagaagacaaaatggaaacaaagtagttacggtttaagttttacctgaccaagcaaacaaagatttacttttagatctgcaaagttaatggaaataattatttacacactttagaagcgtctgtttatgatgtggagcttaggcatatatcctagtactcagaaataatctgttcttgagaacctacagactgtggcaggagaagcaaactgctcatctaagatctagaatctcagtgtttattgtgaaccaaccccagagacttgaactgtgtccagagagaactgcattttattttgtttctgccttcctttattaatttcagtactttttcttaacacctctgatgaaacactctccagcaagaagttgtaaatgaaatagtagtcctgttatagtctaggtagagaactacttggggaaaactcccagtagagatcaggaaggtgtttaattggtttttagagacataaggttatgtaactgctaaaaataaaaacaaggggggataaagagtgcacttatagacactgtggctttaagactcaatagaagaatcaaattaacatctgaaaaatatttcttaccaagctttcatttccagtattaccctggtaatttgtttttctttgcaattgtgtatgcatcagtgatcatatatatccacaccccttttcttctctttatttactcttctcgtatgacacagttattaaattaattattctgaatagtgaggcatggaaaattatgacttttttctattactattataaaactctattcccatgttgtttcactaagatggtgtagagaaatgcattgtatagttatgaacttagaacatgccatgccagcagaagctgcctggatccaagagccaggtttagtccacagggaagatgtattgccacactgagcaatggcacaggtttggaagaacagatacgtgatatagtaggagggctctgtaaaagttaccatatgtcctgtgtcaggacaaatagaactgtgacctttcctcacccctgacatgtggtgttcatatatgactttggcagtgccgctgcattcaccctagttacaaaatttgcaccctattcctatgctctgcaaacctgggttggggaagaaggggagtggggattgtttctctccacactcctcctctctcatatttattgtgactgtgcatgtatggatacaaagcacacaagtgacattaagaccttaagggaaaatccaggaatgagctactccttcaaagcgtgatgtgcatgcaagctcttttagatcctcaaccatgttacagtggccaatctaatgggataatcatttggaagtggccaatgcaatcaattatgtttgaattcgtaatcaattgaagaagggatgaatcagaagcattagctaaagtagtggctttctttgatggtgttttaccaagaggaggaatcagatcaggtcccaccacagtatgcaggctgagatgattcatcttttccaaaaactgagactatcaggagaacaaagtaattcttctttttctgcatatggctatgctgtattcttcattacttcatgagtgtatgaatttgctaggactgctgttacaaagtgctacagactgggtggcttcactatggaaatttactttctcacagtcccggaggtcagaattccaagatcaaggtgtcagcagagttgattccttttgaggcctccctccttgacttatagatggtcaaggagatgtaccttattatgtttcctctgtaggtgtttgtgttcagagttgattccttttgaggcctccctccttgacttatagatggtcaaggagatgtatcttctcatcatgtttcctctgtaggtgtgtgtgttccaaatttcctctaaggacatcagccatattagattagatcacatcctcattaccttattttaacttcattacttctgtgaagacctttctccaaatatgatcacattctgaggaactggagtttacttcatgtagggattttatatttttgtagataaattcagtccataacaatgagtctcatgtccataaaagaaaaatcctttgcttttgtgagatgcatgtacatctctaatttttgtaacacacataagcagatatatacctatagtttaagtgaaatgatgtacatatttaataattttggccttctgtcttcatatttcttgcatatttcagtacagacagcctgttatttaacatagactcacaacatagctaatcatgacaaaagactagcctaagacaaaattggaactcgagtaggttaatagatgcctataaatctcctactggtgtgtatgaataaatcacacatcacatgtgcctgctattcatctctcaagctttgctgtgaataaaaggcttacatttgttcctgcatcagccacttctaaaaattccaatgtagttattaataaagtgccattttgtacagcactctatttaagtagtatgtttcagtcatactcctattcaacaaatgtttactgagcacctcctatcactaagatactattgaataaatacatacagaaatgaatttaaaaattaaatgtcacagtgctttgtaatgtgtttggagtaagaaaaatacttcatcgttaggaaattttaaaaagcaaaatacttcagtgactgacatgctaccaggagtatgtttatgacatagtagttactggattttgtttcaagttaaataagatgccatttaatagatctgagcagcaatataaaggcttatgcatgaccctggcttattcaatagtttatttttttgtgtctcaaaagattagacatctaaatctgaaagaaattaaaattatatttcctagattaaaaaaaattgtaatcctataataaactgcatcaaatatttttctgtgttgtgaaaatagaccatgctctgacacatttctgttttcttctcaaggaacgataagaacacaattaccaaactattcgtgatagaaatcctgaaagtacatgcaaaaaaaaaaaaaaaaaaaaaaaaaaaaaaggacaataataatcccagaaaagggaggagttgaaagtgggggacatgtttgtttcttcataattttcttattccagttcttcaagaaacacttgtggtaccagtacttagaaattataaagcaatttaattaaaaaaaaaaaacttgacagaaggatttttaaagaacaagaaatagagaaaatagattttcctaaattcaaaatataatgtgtatatatatatgtgtgtgtgtgtgtgtgtgtgtgtgtgtgtgtgtgtgtgtgtgtattttatttttctgagagggacccttgctctgtcactcaggttggagcacagtggtatgatcttggctcactgcagcctcaatctcctgagctcaggccattctccctacacagccttctgagtagctgggactacaggtgctcaccaccatgcccagataatttctgggtttttttttttttttttttttcgtagaaatggggcctcactaggttgcccaggctggtctccaactcctggacttaagtgatcctcctgcctcagcttcctaaaatgttgggattacaggtgtgagttactatgcccagcctgaaaatataaagccacagattatccacaggctaattagtgaaaacagattgtggtatattgtgggacttagtatagaacaaggcttgattcataaaccagaggaaaatgagagactgattgttcaataaatgattgactatcaggtaaatagaatcagaagtgtatgttgacccctctttctataccaaaagtatactaatgatttcaaaagttaatgtaataaacaaataaagcctaaggaaaataataagtaaaattacatgtttatttatgttcagcaattgtaaggaccttgtgagcaaataaaagcaatggaaggcaaaaattaacaactttgacacagcatttttttatctgaatatcataaatcagaaacaaaattaaaagacaaactgtgaggaaaccgaataacaaatatggcaaagaattaaaaccctgaagaagtcatgtagatcaaagggtaacattaaaataaaagctcaatagggaaattgacaaaggggaggaacataatctatctaaaaagaaatacagataaccagcaaacaaatatactcagcctcacagagaaatgcaaattaggtgtttttttcctatcctttatttaaagatttttaaaagtgactactatacccagtttggtaagggggctgtgaaaacacgtgtccacaaatactacttgagggagtgcactttgttaaatattttttgtaggtaatattttagtatgttttaaaagccttatactgttttttgtttgtttgtttgtttgtttgttttttgagacggagtctcgctctgtcacccaggctggagtgcggtggcgtgatctaggctcactgcaaactccgcttcccaggttcacgccattctcctgcctcagcctccctggtagctgggactacaggcacctgccaccacacctggctgattttttgtagttttttagtagagacggggtttcactgtgttagccaggatggtctcaatctcctgacctcgtgatccacccacctcagcctcccaaagtgctgggattacaggcgtgagccaccacacctggcccatagacatgcttgtgaatatttatttgtagggatgctcaccacatttttatctgtaatagcaaaaatttttaacaagtatgaattatgaatttaaatgtctatataaattagaatatatttgtacattgaatgaattttcacagtgttttgaggatatccaatggtcactatgtcatgttaggtataaaaatgtaatatgaaattgcaaacttgaacatatagtagaatcctaattctgaaaaaaaaactaaaaaggttgatagtttacaactatttccttctttcaacttggcaaattttctaacatctctatattacacatatatttcatttatgtaacacccggttaagagagttgactcctgcctctagtctttccattaagaaatatagatagtgtccttgtctctttaaaatcaaggtcattataattcactattattgagctgataagagaactttcaattaagtgcttccagattaagcactactaagtctatttgaatgtgtctgctccttcttttattaataattcattgatactttttataataattctttttcatgttgaaatcatgttttgaaaacattaaaaacattggatttaataaaaggtagatacaccccatagaaatgaagctggatgaagaaggaaaataagtcagcagaaacactttgaatcaaaatattctgaataaaatcagaatattctatgatcttttcatttttatgccatttctagaaattttaaaaatgttggcaatggtgctatgtataatatactgcactagattgaaaagaggtagccactgtaattgaaaagattgctacacatttgaatggaccaaatgtgttttaagaccaaattcaagtaaaaaggatgtgtctcttctgaactgaagctcattaaatgtttcaccggccttcctgcaaaaatggattttcaaaactttggaaaggatagcatttaagctgaatttgacctgtattgaccattttggaaatcagccaagcaattcgcttgaagatacttgaagcacttgaaatatggaattgctggaaaaagaataagacagcccaatagctaccattgcccagggtgatactttggtaacaggactgatggcttgtataacaatctgacatgctgataggagttggggagtgggggcagccattgggaagggcaaagggaaccctaagagtagttttttctccctattatgactggctgtctctgagtaggttttgaaataaaagcttccatttttaagagaattgattggtcattgcgtaacgacaattctacgatataacaggaccatcccagttagtgctttgccctgtcactttggaggtccattagctcttccattcagtgagggtcctctatatcaaatggttctccagtaagtgctctgagagcagcagctaatgattccctgtggttgaagcaagtcagaatgaaaatggagttttggcacacatccctgaattccatcgacaggagggaatgaaggctaaaatatctataaatccaggccaggctgcagagtcactgcagattccctgcagagtggtgttaataacaaggtgaagaaccttagaagaatttgcaagttcatcaaagaagtgttcatgggaatgattgccatagcccagacataatttaagtaatttgcaatagccatattgataacaggtggtctaccgattgcttttgacaagaggaaatgaagaaagttataattattcttcctctctgtggacatagcttgtcatgatagtcttagaaactcggaaagcaagcaaaccaacaacacaatgaatgttattttgtaattccatgacacttaagcagtggtttacctcttctaattcgacctctttgtattaaaattagttggcagttagtacattgctttggatatggatatttaagtatcatgcaaaaaaacaaaaaagcacattcaaccaacacatcatttagttattagccaaagattactttattttaatgttttcttctgtgattggaatttagttattagccaaagattactttattttaatgttttcttctgtgattggaatttagttattagccaaagattaccttattttaatgttttcttctgtgattagtggctctatctgaagcaggaaatggtgttttttaaggaggtcattatgacttgggtttgcttttgtatccaagaattgacacaaatttgtttatttaaaataccttccctgtgtgagttggggtaagacatacaagaggcaaatgtgagtgttcaaagctgagagacctgagttcaaagtcctactcagctttctactaactctgattttttgcaagtcatttaatcagaaccttcaatatttaatttttttaagatagtctaatagttgccccaaaaggccaatgaaagaattgaaagcaacatatagaaaactatgactgtgaaatagatactatgtatatatatgatagctctttcctctctcctttatgctcatattgaagccaaggaaaagcatatttcaagaatcccgtgagagaaattgtaccagtatcatctgccttatttaattaacaggagacttcggtttaaaagtggggaggggcatgccagagaattcctgtctactgtatattctcaggactcagaattcctatcgctaattttaatactttgacaaattagcaattttctattatttgttacattctgcaagcatttcttgatttttccctcattgcttttcttaacgactcttcatgggtttaaaggaaatattatttttcctttcctacttaatcagcgtaacgggccataattgtgtcaataacatgaaattgttgtcgattttgcaattttgtgacacaatacaataggctgttgacttttttatttttttattttttttgcagaaaagaaaaatacactttcatgtgaaaatgtacacactgaaaattatagattttacttgtggaaaatatatgattcaagaaaaatgaagtgatttacttttttcttaattctttcccaaaatagttttctgaaagtttagctatctgtatacttcagtgtttaaaatatgtaggcactaaaattcttaatggcataaaataaaaataatctgctttacgaaagcctacagaaaataatttaaaaggaacattttttaaacgcaggatatgttagcagcgaatatggaacccaagataagcaaggcgtgttcgactctacctagacagtgtcagatctctggcagttagtacattgctttggatatgtagcttttagctgctctcctttgtaagttttaagaccaggcttgtttatgtataactattcaatgtcatacacacacggagacgtgcacacactctttttgtttgctcccatgatgatttatttaccagctgtaaaatggggatgatgataactgtccttcctggcagtcattggaccataatatatgtgaatgtcaattggaagttgtaaaatgccatataaatgcaagatattgtagctatgcaaaacctaaaattacctaattgattttggtctgtcccttaacccttataatgagagtgctagcaactaaaacaccttgaaaattactggagtgtttttatagccaatagactccagaatttatatagcacttagaactttatcaaactttctttgtactagtctgattatttaaagaagatctcactatataatgatgtctttaaaatatttaattttaaaaagataaaaatctttttaaaagataaatattttttaaagataaataagaatatttttatttccttgcagactctttaaaaagtgttgtctttttgtcttctgtttttcctaataattcttatttggtctggctggttggattcaatgctccactgctactagcagacaaattatacatattcttgaccgaacgtggtggctcacgcttgtaatcccagaacttaggaggctgaggtgggcagatcacatgaccttgggagttcaagaccagcctggccaacgtggcaaaacccagtctccactaaaaatacaaaatattagccaggtgtggtgatgcatgcctgtaatctcagctacttgggaagctgaggcacaagagtcacttgaacctagaaggtggaactttcaaggatgcaataagccgagatcataccactgcactccagcctaggtgacagagtgagactccatctctaaataaataaataagtaaataaataaataaataaaacatattctctgtgattcagttttcttatctgtgaagtgggaaaaacaatattactacttcccaggattatttgaggcttgatataggtaaagttgagatgcctggtattgagtaaacacagggaatttggggtaagtccagtataatatagtaagttacaggtattgttactttatctgcacagctttgttgacaggtcagtgtacttgtgtcagaacttcttgataggtactcagagtctcccagcacagtgagtcttgtgcagagagttcaatttagatccactaatgggaataaaagagaacaggcacagatacattatttaaaaacacaataataccagatcgtgcacaagaacacattttagaatcaaggatcattgtaattattcaagtagtaaacttaaaagacaggcagaaataggaggccaccttttgttaggggaatgctcccttttgacagttcctgaagaaaaaacatgggaaaaacactccttaccacctacagtttaggccattcctgctgttgacccttcagatgtgtccccgaactgcctcaccaggcacctgcttcctgcctgagagtttcactatcttgtgagggatgggacagtctggaagcttctcccatgcagacagagcagagagagaattatgcaatattttgtatcccagataaaattatatagtttaagtggattatggattatttcaccaaatttattttaaaaattaagaacatatccataaatattattttagccagagatgatctatcagtacaaatgtgaacagtaaccttggtaccacaggccccgccgtgcaagcttcttgggtaaatatttcaataaaaccttctcaaaacaggataaagatggctcagctgttctgtggactctgccgaggcaatgagggaatttgccgtgtccttctgtggtctgcccatctctggggctactgaaaggattcttcctccaacctaagtttcacagcatcaggcagcacttctgggttcctgagcatgctatttctttccaaatcacttttgtctgatcatcatttacaaacataaaagatggcttaagggccaaatcacaatttttatgcgtaaaccaaaatgtcagtgtttgtgtaccagactagggaggctgacaccaggttctacatgcttcgcctccccactaaactctctcctttattgtcccagtggttcaggaattcaaactgcttcaaaataagacatttaaactctggctttatgtactctacttatttttagagataggttcttgctctattgcttaggttgcagtgcactggtacagtcatggctcactgcagccttgacctcctgggctcaagtgatcctccttcctcagcctcccaagtcactgggactacaagtgcacaccatcatgcctggctaattttttaaagtttttgtactggtggggtctcagtatgtggcccaggctggtcacaaactcctggccacaagtgatcctccttccttggcttcccaaagtgctgggattataggtgtaaaccacggtgcctggcttagctcccaaaacttttcaggcataatgggaaattttaataactttctctgtaaaataagcataatccaaggatgttccatgatgagtatgacatatacttgacctaattataatttgattacactcaaattcatagaaaagcaagactatcatatactatgtggatttttcttaatgtaactttcaccagaatgtacaacctctgtattgttatccccactttgcagaaatcagctgtgagtttcctgagtcactcagtgctagcaggctttggatgataatgaaacgagagagttccctgacatatgacaggggtgtggctcacctgtttttggtcgtcccccagctgaaacccctgaaggaggggaagcatgcagaagggcagtgcagaggcgggggcaggtgctttggctccacagtggtgtctggaggtggatacctgcaaccctccacgttacaaagctctttcagttttgccatctgcagatggcttgagtgttaatcagctcagtggaccctctgctttatcgcaagggcagggggccagtgtgacagccttctgtatcccaagctcttgcccagtggctcagaagaattggatcacatgcaggctggaaggatgagtgcaaggttttgttgagtggtggaggtggctctcagcgagatgatgaggagctgaaagtggggatggagtgggaaggtgatattcccctggagtggggctgcccagtggccagcctcctccagtcaccccctgctgaactcccctcagcatccagacatccctcctcttctctttctctgccgcgtcgttctgccattgctgatctgctggtctgccctggagcttgtggttcagggtttatatgggggcaggataggggaatggaaagccaaaaggcaactttttgggcatgaaaacagaaatgcctattcttattcagggatgcgggcatctaggcttaaaggtggggcctttgccagggaaccaccctcttcaacccagtattttcccatttcctgtccgtatcaataaggtagaagagagcgccctaaaacccattcttttcactgtatcccaactctgtgtcagtgcacgttaacatccaactactcttttatttcgttacctatgtacctacgtattacttgagaaaactaaaaaattgacagaagggccaagcattccttgttttatagaaaaaagccaaagacagtgtttccagagtttatctcagagtaaatctctaaaaatatgtttatttttttaatgctcacagcgattctggtggctttatgaatatcaggaaaatatttctactaaaggcagcttaaaatccaccttacaaacacacacacacacacacacacacacattcacacacatgcatatacacacagtctgtttactaggtatctggcatcatgcaagacactgaggttcagtggcaaatgagaccaaaagttccttcttgtcaataacttgctataagagcactgggaagccaacagaatctagtgtggaagggaacacaatgggcagattctgaccatactgggcagtgaagctcatatttgggattatagggaaacgcattctaggctggtaaactgagggaaaatatcttcctcaactatataaaatccctcatgcaagttttatcaaatgagaaattaaggataaagtgaaaggaataaaaaagatgagagcattacacctggtttggggaatatgtttttagaaatatacatgccatatgtgaggctatagaatggcactttttgttctattttatgtacactcagaagtaaatgacaatttaatacattcttttatcattctgccaatgtttattaagcattttcaatgttccgagtccactgtaaagtggtaagaatatagtgatgaatgttctcagaaaaactcataagagaggggttgagttggatattttctacttcaattcaatatgacaagttctgtgatagatatgagctatgctcatatctgttttgtgttgctgtaaaggaatacctgaggctgggtaatttataaagaaaaaaaaggtttctttggctcatgattctgatagttgggaggttcatgattgggcatctgcatttggtgaaggtctcagggtgcttccactcctggaggaaggtgaaggggagcattatgtgcagagatcacacaaggaaagagggaaccagtggtgaggtgccaggcttttttcaacacacagttctcttgggaactaaagaatgagagcgcactctcctctgagggaaggcatcaatctgttaatgagacatctgctctcatgactcaaatacctcccaataggcccctcctcccaacacccccacaatgggggtctaatttcaacatgagagtatgtggggacaaacaaaccatatccaaatcatagcactcatatgtacatagaagattccaaaaatcagtgctcatgaagccaggacgggcttcagagaggagataacacattaatttgcatttggaaagataagagcctttttatttctcatttggaagcctactcttgctggccaacaaaggcttggagagttgagctgctattggagaagtttctctttaaatccaagagggagggaaatttcaaaattactttagatgcaattagaagtaatcagcttcatgtcataaatttttgatgcaattggtcccttcctttctggattattttttctctcatgtccagatggttctcacaaacatatcagaagatgatgacatttttaatttctttcactcaagctctgaatttatctgaatggaaagtatagagaagagtgcgattcttcaagcctaacaagtatatcacactgattaaattatgaaattaagattttttaaattcaaaattaatgtataacttttatctacatatttgagatattcacaaagacaattttattgttccaatcaaaaattaattgtattaacattttattattcatgtatttatttatcctgagagtcttgctgtgttgcccaggccagagtacagtggggcaattttggctcactgcaacctccacctccctgggtcaagcaattctcctgcctcagcctcccacctagctgagattacaggcatgcaccaccatgctcagctaattgtagtatttttagtaaagacagggtttcgccatgttggccaggctggtctcaaactccaggcctcaagggatccactcaccttggcctccctaagtgctgggattacgggcatgcgccaccacacctggcctgtattagcattttagatgtaggaaatgatttttcagttctaaaattttcctaaagaattaaacatatccacttaaggatgcgttgaccactgatcattgttgaataatgaaactttagggatacttactggcacattcaagtgaaaatgttctacaattccctaggtagtatttcttttctctaactgagctgctgcgaggctcgcatagggtgaaagtaaggtaactgtaaaggatgtaccttgttatgggtcaggcagcaggttaccatattggcacatatagcaacacatgcatacagcagagatcagagaaagaaagtttgtaagaattcctaaaacaggatagctttctagtttctcaaatactgctttctgatttaaacaaatccaaaatacagttatagctaacgtcagagaaaggagttattaattcagctgtagaccattaaacaaacagaccccaggcttaggggcagatgggatgcttggagatgtggatgtggagagacaaaggcaatgccaagaggccagtgtgcttagagcctggcctccctggagtcctctgacagcaggtggatcccaatgaccctgtgctcctgaagggcagaaattcaattaggaactctcaactttcagctttgaggctcaggctagtgtatcagtgggtagctccactgctggaggaaaaacattctgcagcagttatgaaatagaggctaataataggacaagggagagtgaaaaacatgaggttggaaagcattggcagaaaagatgagctgataaagtatctactttaaataaggtcataattttgccacagtttggggtgttctcctgtgctaatttatagtcacaatcaaaatcacatggaagccttattttctttgacaaggttttattttcagtgcactagaaagctctttcctttctgcctgggttagcatatgtgaaagaaatagtgattattttaatgatattaaatagtagctttgatctcttccccctacaagctaaccaaaacattatctggatgtatgaaatgattcctttgtgagcaaaacctctgtatctattataatgtttttgttcatctacctgaatctcccactaggctttgagttcatctgtgcttccggaacctaccacctactcaggaaagataaactggatcaatgaaaaatacgctaaatacctaccactctcattttttagacgacaaatttgaggtgttaaaaatgagacagaaatgttaatatcaatcttctatttcaaacctactaagcccaaggcaaaagcttacaccctttctacactgcttcataattgcctaccttgtgttcatgttaaatatgcaaagaaacgttgtatccacatttgatacatgacaagaaggagactcccagagggaaggtcgcttcctcaaagacgcccaccagtaggtaggaggtctgatcgccagtctcagttctgcctgactctaaagctctcgatcctccaatcttgtcaaatttgctttattataagaatcaccaaaggccatggttataaatatagattctcaagatcttcctctgaagattctaatttaggtatcagctgggacccaataatcacgcattcattgttgagaccaatttgggaaacagtgaataagactagtgtttctcaaactctagtgagtgtatgaatcctgtggggatcaactgcagattacggtacagtggtaggtctggggtggggcctggggttctatgtttccaacaaggtcgcaagtgatgactgtgctgtgggtccacagccgcacttgaagcagtgaggaactaagccttgctgctcagctcacaataggacccttattcccaccctagaggtcctttagtaattctgccactaccacacaccctccaactctgtgcagcccagcaattatgccagagcaagctttcctgcatacccttgtaaacatgtttgtgaagcttatggaaacgtctgtttatctgtatgagttaccctgctagttcacatacctaccaaataagaatctctgggcacctgcgacacaacttcatcccatgcccatctcatccacgatggttttaaaagccaactgtttccacaggtttctattataacagggggattttatagatcacatttgctattcacaggtttagcctggacaactgatatttttcccaaacagtagaacttttaagttgggggaaaaatgttctctgcagcattcagataaatggatgaagaagcacttcttagaggttgccaatcatcacacctctgcaggacttaagttcatctaggataactcacccgaggctttaaaaaattactgatttttagctgggtgcggtggctcatgcctgtaatcccagcactttgggaggccgaggcgggcggatcacgaggtcaggagatggagaccatcctggctaacacggtaaaaccccgtctctattaaaaatacaaaaaattaaccgggcgtggtggcaggtgcctgtagtcccagctaccagggaggctgaggcaggagaatggcgtgaacctgggaggcggagcttgcagtgagctgagatcgtgccaccgcactccagcctgggcgacagagtgagactccatctcaaaaaaaaaaaaaaattactgatattttttataactaggaaagctgtaatgtgtaaacatgacaaaacgccaaaacgctaagtgaattttacaatggaacatggacttttcaaagggacgattctgattagtgaaatctgttctaaacctcggcttttctgattcctagcagggtgacccttggtaatatcttagctccagtggaccttaatttcttcattgtgaaatggcgtgattgaacataattcctaggtctcctcgaattctaaattcaggtgaagaaacagggtgatccgtcgcaatttcatctgtttcagtatatgcgtttatgacatttgtatcaaagaaaagtggagacatttcagaaacagcaagtatttcctgagaaaacatagctgttctatgtgttgaagcacaaaagataaaatgccaaattaagaagggtgtgactgtcaggggaaagacggcacacagaaaacctgttagtccttcatgccagtgcctcacagactggctatctactcacctgagcagcttttaaaaatccattctgtttcagtaggtctggggtggggatgaaattctgcatttctaacaagggtctgggttccaggggtgtcgctgaacgtgcgtctggccttatctagcaaggctttacaccggagctcttccactttagctgcagagttgaactggccagattcaacattcagatagcccgaacacatgcagagcaaacaaatttggatctctgtaagtgggactaaggcatttgtcttttaaagctgcctaagtgatttccatgggtagccctggttgagaatccctgctctactcttctgccacaggcctccactggggcttcccaggtccttgaaactttgggtttcgtttatttatgaacacatttatcacaatggtagaatacaaaataggtatttcaccctcactttaccataaccagtagagtgaaaccgactgtgccaagagatcatgctatttatctggtggggtcctttacacactcacagaattttccagaggtggtccttatgaagcagactgactttttattctgctccccaagcaccaatgctaccactaacaccgcttgtggcatatttccccatggctacatgggtctccataattgtcaccttcaagttacctgttaccatgctggtcaccatacccatgtttagtaaggttttccatggctgcatgtttacaagctttctgatcatctttcccttttccttctcatcctcactcttttcattctccctcttccttctatgcatattcattgagtacctgctctctgtctagcctatgctaggtgcttcattgcaatctgtacatggatgaagtacttatcttctactgcttctttggaattgaatactaagagtgaaattacttggtccaggaacatgaatatgttcatgactcttaacccaaatctctcttgcctgcattcggtaagcttctatttgctgattgaatatgtgtaagcttgcccctccttattatttaatgcttatgtctttgattgatgtatattttttatattctttatttggctgtaatgtgaatttaaattttacttttttctttaatagtgaatgctttaaaggcaatgagaaaccaataaagaatattaagcgatcgaataacttgctcattttatgcatgtgtcatatattttcatcttcagaagctaccagttcattctctgtataggcagggacaacaaggatgcctcgcagtaaatattctttgatttcaccagagcctcttagctttgcaaatatgagacatacatgcatcatggtcctgcaggatgagggtaagtaatctgagagaaagagagagagaggtgtatgtgtgtgtgtgcgcgtgtgtgtgtgtgtgtgtgtgtgcgcgagcgcacatgcgtgagttcatcagcctgcccgacaagggataacgtaacataatactcaagttctgggagggtagagaccaagactctaaaccgtgtccttccaaattcaaagccaacaggacttgtttgagaagagcagtgaccttattgagatcaatggcaggaagggacaccaagagcacaaaggggaaatgactaggagaccaggaaggagtcagatggtgacccaggcttaaatctaaacctagagaacagtcatggtgtgtctgtattgtcacatggtgaaagtgaatcaggctttcctggcttccctgctttgggcttttgagggtgtgtcgtataatcctgggaggctgggatttctgcaaataacgtttacaaatcaggttggattgggatttttggaggattaccacttctgtcactggtgccaccttgtggcaaatgctacagtaaaaacttgctgtagtgtaaccgatagaatttgaccatcatttcttttactaggcgtttgggctaggaagtgagaacaaatctaatatttggataaccagtgaaggggaaatcttgagctttcagtcactaaggataggtggaggttttagaactctcttaaattatttatacaggattgtttcgtttgttttttcttacttgttcagggagatctgaatagttgtaggggagagaatgaattggaggagtttctacctaaatgttaaacctcctccacactccccaacatcaacctggaaaagttacagagggaaagcattaagacatggaaaacattctgagaaactccagtgaaatacgtctgtgggagacaggaactgttgtgaacttggagtacgtgtgatttgaagcctagagcaggaggcagctcatggggctctggagctctggctctaagccagcaaagactgattcactttcaccatgtggcaatgcagaagcagctgggttgttctccaagttgtagatttaagcctggatccctgtaacttagggaaagagttgatggaattttctttctttgcttctttccttccttccttccctccattcctccctccctctcttctcttctactctcttctcttttttcttttcttttctttctttttgacagagttttgctctgttgcccaggctggagtgcggtggtgcgatcttggctcactgcaacctccacctcctgggttcaagcgattctcctgtctcagcctcccaagtagctgggattacaggtgtgtgccaccacacctggctaatttttgtattttttatagagacggggtttcatcatattggtcaggctggtctcaaactccagacctcaggtgatccacccacctcggcctcccaaagtgctgggattacaggcatgagccgccgcgcctggctgctgatggaattttctcttgcttctctccttctatggcctggtgtgctatatcactcacactagggaggctcagactataaggataagagcactagaagatctgagtagtattcgtggatggagagcagaggggacacaggtgggagctaattgggcgcaggcagccatttccccatccttctttctccaaatcctgataagtgatggactgcacccaaaggagtgtttcttcctcaggatgttccccctgggagattgaacatgaagcctggacctaagaaatggtttggtagtgttgagaggggttaactgtggcttcctggcacctgtgactctcacttcaagctcatcccatttccactctaacaccgtaggaggactgcaagtctaacgaagtctagccatggccccttttacattttcattgcctgaaaaattagccaacgcttggggggaaatgagcttcacaggcccaaataatgacagaggagcagcactatttcaaaagaacatgaattagagaaaatctttagaccaaggaaaggaaacagagacaatgatctaaagaagcgagaattgaaagagagaatactagatagatttgaaaaagataatccacagtaaaatgggtgcgataataacaatccttgctttactggactattatgaggattaaatgaattgatatatgcggtgcataggctataaagtgtttaaacatggagtataataaatattcactcttatgaaattttatattttgactcaaatgtagaatttggggaagaaggactctggtttaatatattgagtgtgaagttctaattggacattagtatctttgtatatatgtatattacatttgaagctcaatgtaaactgggccagaagtataaaaccagtggtttggcataaactgtctctgacattgtaggagaaaacttcaagtggaatggaagccttaacagtgatgtttgtagggcataaaaaaaaaggtttcctgaagaaaggtaggcagattcaacaaaatgaacaatccaaaaaaaaaaaaaaagaaaaaaaggaaaaacaaaaaagccacaaattcaactacttttataatattctcaaatgcaattttataatattcaatattaaattgtgtgaaataggagagcaaaagttttgttgccattcctcaatcctcctcaccaaggtttaaccacagtttgttggatatttaccctcagttctttttttatgtctaaaaaaaagacatgttttactcagtgtacatgtggagctttttacttatggcttcagggatctaactcatttcttaaaatgactatgttgcattccaaggatgaaaatacacactatttctaactatttttctatagacaagcagatcagattttttttgcaattaacgctgtagtaaaacttttaaaaatacgtattactcttgagttattggaacttattcacaaaaaaggtaattaagttccagttaaccagtatgtatagattctataatctgcccagaaacatgctaagtactgtatataaagcatcattgtgaaagataaaggcagtgagtattttaagaagaaggagtgattagcaatgtcaaacgcagcaatccagtagaaatacccatggatttagcaagaagtcaattgagataaaaataagagctatttgaattgtactatgtagtaagatggcagatttcaattagttaaggtgtcattagagatgggaaagtatagaaatgagtacagattaacactgaaacaaattatcttcatatacctatttgacgggaaaaacatatttttgagggattctagtagaagtgtacattggtataacaactttggaaaacagtttgttattaccaccagtcacattgcacatgtacctacactgtaactaatcacttcctctcccagagaaattcttaatattaacactccagaagacatggacaagaattcctagaataaattttgtaataacccctaatggaaacagccagattttcattaatagtagaatggcagcggattacattcatacaatggaatgccatccagcaatgctaatacctacaggtaaccacatggatgaaccacagaggtataatattaaatgcaaaaagcaagatttgtaagaagatgcagtatgatttctgttagacaaagttaaaaggcaagcagacaaaatggaatattgtaaaataataaatagcagcaagggaaccgtcatcaaaaaaggcaggttaatagttggtgttttgggggaaggaagaagattccatcaattaaagatgcatagagggctcctgaatccagcatgtttcattttctgacacagcggtttttgtatgtaatggtgatgttaatgatgataatgattaaagatcttctttaagaatggaatatgttgtaatggaaaacgacaacattacagagataacaataactaacatctattgatccttttgtattctggacactattctgaatgcttatttaatccttataaaaatcctttaagataaacatagctatcataccccattttatagtagaagaagctgagatacaaagcagttaagtaactcgtccaagcggcagagcaagaaggcgatcagcctccagagcttagattctcaacaacgtgtacaagattacctctgaaagactgaaaagctatttcatttgtgctttgatttttatatctaggtaactttgtagtcaatattttactctatttgtgagatttatatcttaataaacttttctcatattttattttatcacttatgcttcatgggttgggagactttatcacactaaatgagacacctttgagagtaagatgctataaacaatactcttggaaaacaagcataagctgggactgtcctggacaaactggaacacatggtcacctttcatagcaagaaggtgataatgcagcaaggccactactgatgaattctttcctttcttgtgttaacgtgttgcttatcacgtgagtttttgtatgtgtgtgtacttatgaacattctctttagtttggtttaaaccatatttgctcttttatgccatttcatattgctttaattaactttacttttaggagattttaattcctagcagtataagttctttttcttcactgttacactttatccaaatataatttgataatttaaaaatttttaaaaacatattttcctgttttataattgttttatttgtattacctttatagaaatacaattttattatgtttatagagtgcacatggaaaagaaaaatttgcagcccatgggatcattactattaattgctttgccttccagtcttggccagaaatattcatctttataatatttcattttatccttctcatatgtagtatttctgtgcatttattcaaatgtttttataatacttcctttagtagcttataggtttttatggactcattcaaatcccttaataattattttatcaggaatcttctcattgcttaactagtatgtgataactagttaagcacaaatttgtgttttataatgataaaggaaaggcacaaatttttgtatttttatttatatctagttaccttatgtactaaacatttttgttaggtagattttgaattgtctgccttttgcaggcctgtaatcctgcaatataaaaatagtgcatctttgtttcatagacttttgttaattttttaaaaatccagttctcacatactattttattgatccagcagtcgaaaccgatattaaatatgttaaagcttattaaaggtcccattattgtatataagactgtaaagtagttatctgtacattttatacataatgcatatgtataaatatattttaggcatagacataaatttctgcatagtcctttttatcaaaacccattcaatggagtactttattctcattaagctattcatatggtgtattaaactaatagttttgcctgtatagaaatattcttgaattcataggatgaatttaatcctactgcttaattgcaacctctaataatgtacttaagactttaatttaatattcattagtgagattggcctggcctaattcttattaaagctttattacattagatatcagttggcttttatttcacggaataccttcaaaaaggccttcatttattcattacatattctggcaatttgtgtaacactggtattaaagtttgtttatattttaaatgaattttccaataaatgaatccaccatatttgttttcggtagggtaattttttgacagcttcccaattctcatctctgctaacatttttcttttctataattcaggactgcattgtacatttatgtaatttttttcataaaatcaaaatttgtttatatcttctctctcttaaatgtttaagattttctgtccccaaatgagtgcatttagtaggctgttgcacatactatcagaaattccatgaattcatacctaaatttatttacttatttaaacaatttatgtttttccttttttaaaaaaaacacattttctttagcattgactcatttttgtgtaatttttggttaaattaggttacatgttttgtttgcttttacatttttaataatgaaagtacttaacaccatgattgtttttgctgagtgtgtataattgcttagttggttgttttaatagaattgttactatgtttttatttattttctccttcactcaattgttatttggtaaagagattaaaaatataaaagaggggattactatttaaatttttatctcaaagtttatgttacagtaatctgacattgtgatctgtaagcatagagactgcatttatacatctctacagctaaatttactgattttagaatgaggaagaattttcacaatggttaaataaatgataatttttctaaatgttttattaaaaactcaatgttcacagatacaaaattcaaactcttactatttaattatcctggttaaatatgtttctcattcttttatgtctttttatttttatcaagtggatgtgtttatgataatttatcttctcctatacttaaatattttaaaaacaattttactgcatcactaaacattaatctgctattcctttcaaatgaaacctttttgacagataattttgaatataattttatcactttttaaactgtcattattaattcacttaataccttaataccattatattaatattgacaaacttatttaattttattcacatttgagtcatctgatttttttctccatttgaaaaatgtctttaagttgtttgggtttttctttttctctaaatgcaaaacttgaaactataaaactttattttagtttttttttattttcaacttttattgtaaattcagaggtacatgtgcaggatgttacataggtaaaaatgttacatatgtaaaaatgtgccatggtggtttgctgcacagatcatcccgtcacccagaatccattagctattcttcctgatcctcttgatcctcccaacccccaccctctgacaggcccaagtgtgtgttattcccctcatgtgtccatgtgttattatcatttagttcccacttataagttagaatatgcagtatttggttttctgtttctgcattcgtctgctaagggtaatggcctccagttgcacacatgtccctgcagagaaaatgatctcattcctttttatggctgtatagtattccatggtgtatatgtgccacattttctttatatagtctatcattgatggtcatttaggttgattccatgtgtttgttattgtgagtagtgatgccatgaaaatacacatgcttgtgtctttataatagaaagatttatattcctttgggtatatacccagtaatgggattgtgggttgaatgatatttctgcctctaggtctttgaggaattgccatactgtcttccacaatggttgaactaatttacactcccaccaacagtgtaaaaacattaatttttctccacaacctcgccaacatctgttgttttttgccttcttaataaaaccattctccagcatctgttgtttttgcctttttaataaaaccattctaactggtatgaaatggtatctcattgtgatttgatttgcatttctttaatgatcagtgatgttgagctttttatttatgtttgttggccacatgtatgtcttcttttgcgaaatgtctgttcatgtcctttgcccacattttaaaggggttatttttttcttgctaatttgttaagttttttatagatattgtacgttagatctttgtcacatgcatactttgcaaagttttctcccgttctgtttctgtaggttgtttgtttacattgttgatagcttcttttgctgtgcagaagctctttagttttttcattatatatttagatttattgactgtatttattatacctattttcttctcagacaatcaagaataacaataatagctacaaagttctcttggaggaaagatataaaaaatacttcttgagcaaatattgtgccattaatatgcaaagtgtatagaatgatattcactggtaggcaggtctcaaatggtgtggagcaagcaccttttccaaaacatttctcatggtttttcttcttcactgagattgaattagattaagcgtaattaaaaatggagagactctatacaaggaataaggagggcaatattttataggtaagtatgcgagagtatatgaaattggggatttttgctataaagaggggattgttgctatagacagtaaattgatatgattttagatacaattataggatacaaattttgtttacaaatatttagtaaggtgtgtttataaaatgggttgtcctgctgaaaattgtaaaggggcaagaggtatagtgaaaaagaaaaataaaggcaaaagccaagcataatgttttagctattaaaccacatttctgcttttcatgttgtcttaaagtgagcatatattcattcttgcaattaggagtatttgattgtaaaactgctaaatacaaaaaaataaaacagataaatatagagtaatgctagcaagtagtaattcagttgaaggaaaaaaaatcacatcagtgaaatcacttttccatgaggcttttccatcaaatataaatttttatatagtttaagcacatttgtttacttttattcctcattattctaccctctctggtctagaataagtctaacatgggcatttttaaaaggccatacatatttaaacgaaaatgaaaagattaataactgtgcaagtattgaaactttaattatataaattctcaggcatgaaagtgttctttggcatttggctgtatgtaccattacttgtaatatggctccttattaaaagtcttttttatgcaagaagataaataatacaaacatcaacaatagagtggcatgggtttatttagatattaaactgttaattatgtatttgtcaaaaatcataaatcaggacaagttgagctggagaatgaaatattcagcctaggtctcattgtcatcataaattcctaattttggtttaaattaaggtatggacaagagtcttcatagaaacattttcaactcttctcttcttattcctttctcattttctctaaagaaatcttatcgaacatttaatctcaaaggtcatgaaaaagtatgattgacccatattgaagatatttttactactttcctttatactcggaaagatccactttttcagagacacattaaaaataactacccactaatatgtcttatcaaattacttcttggaggctgttattctaaacacaggagttagttcagtcttggcaggttttctttttctcttctttttatttatttatttatttatttttgagatggaggcctgctctgtcgcccaggctggagtgcagtggcatgatctcagctcactgcaacctcctcctcccgggttcaagctattctcctgcctcagcctctggagtagctgggtttacaggcacacagtaacacgcccagctaatttttgtatttttagtagatatgggatctcaccatgttggccaggttggtctcgaactcctgacttcaagtgatctgcccgccttggcctcacaaagtgctgggattataggcgtaagccaccgcacccagccttgacaggcttttccaatacaccatgtcatatttcatttttgccaattatgttacatgctttagctttattttatttttttctttttcttatggaaaatggaaacagaactgcttttacttttaaacttatattggcttgttttaactcctcttatgttttatcataaaacactcaaaatatatatgcttttaattccaatccgctcattgtcttaaattgtattttcaaggaaagaatggaatgcacacaactgctttgattgtcatttctatttccagttactcatgtaatggcactgccaggctggttggttggcattgtcttaggtgacgcatggaccatttcccctgtcttccagctgtgggcgttataacattcttgtttttcagaatgccagtgaatgtaccctaacaaacaagaaaaggaaagactgaccaaatctgaacattttttagctggaaaacatgtaaatttaatacttttaatagatgaaccctcatgttagcatgcaaattagctgttcctaccaagtcaattggaatgtgacagttaattctatacatgcatcagcaatgacctcagaattggctgtccatcaacttccatggctatgaactcacccaccatctttgttctagaaagactttccattaaaaatgtaagttcatgattaaatcaaaataagataaggggattattttaacattaatataacaccagaaattacatttgtttctgtggaggaatgctctgtttgctttggaaagaatgcagatccttttcatttatacagagataatatatatttttaacctgtcagaatggcaaagaacaaagttggatagcatgttgttgatgagcaggtgggagcatacatatatgtataagtataaattgctacaatgaagggcaatctgtttctaaattagaaaagtactgatcctgtgacccagaaatttcatttctaagattagatcttacatatatcctagtatcataaaaatgattccacaacacaattactcatcacttcactgaaacaacaaaatattggcaacaattgctcatcaacaagagattcattaaaaaacattatgggactctcatgtgggatataataatgtgctgtaaaaagggaataagaaagtttttttatgaacaaatgtggacccatttgctgagattattttaaatcaaaggaaaccaaggtaaaatgtaactatttacgtaaaaagagaatgtatttgcttgtgtatggattttatatatgaatgatatctctaaaattacatctgagaaactagaagtattggtgactagtggagaaggaaaataggtggctgtgatcaagatgtgagacaggtaatttgctatagaaccctggatttccctttaaaaataataaaattaatttaagatcatgtaatatggtaaatatttggactgctgatacttctttaaaaatcagtaaactttgaattgtgtacatttataacaaacatcctggcctctaaatatgtgaagaagtgcagaaatcatatcagtggtaaaaaaggaattagtacaagatttcatcttagagcatccagactctaaattgatagatatgtaagaatgaaagtttatttaaagtggaataatgtatacctcttcctgtgtccccaagatggcatcatctttctaacattgattcagcttgggcttgagtgtctgagctgtgtctcacaaactaagctctccataccatcggcatcaaagtcatttgctggagtgtgttaaaataaatattttcgaattctatcccatacctgccgagtcagtgggccttggaaaggagcccgggaatctgcattttacaaaagatcctcaggttagtcttaaaccaagattctagaaccactgttgtaaagcctggggaatagagaggagaaaatactagaactactcattaactggttagcacatgatggcatcttcttacaaacctttgtgtgcattcacccccctaaccacaaagcaaaatgagcatcagaaccttcatttaaagacaggaaaattaagtatttgtctttgtgtaattaagtgacttgccacaggtgacagagcgagagaatgcaaatcagaattcaactcgcaaatttctgctttgtccatgctgacaggaatagcatcattgtaaataaaaatcactgtgttagtgtaactttgaaaagtcaatccctcagtaaaccttgctctgcagtggaaggtcatgcctttctcagcctttcactacctaggattcacaggagatcaaatactttgctaaaaagagattttcttattttacttcacattctcatatctttatgcattactctcatttattcttcagagaacattctgctcagattaacttctgtaagcaacaagtatcccacatatattttcaacggccagctagctattcttaacaggaagaaaaaaatacaaacattggtgtgtactttttatatggcagtagacaaacgagggtaactggtgaatatataagttaatattctgaattaataaaatgaagacacattttgaaatcaacattacaggtaatatccaataaatagctttatacatatacacacactcatacatgtatatatgggtagtttctggacttaaaatagattcaaaaaagtttccattatgtaccagaacaatagctggtcttagggagatgagaacacatgtagagtctgactttatgaagtcattgacattaacacgtatgataactctcaattgtgaaagttaattctgtcagaaatgctgtgtgacaggcctattagagcggctacttgggccatttattgtactgtggcctatttccgacaagtcagataaaccatggtttgaatctccactcagtcaaaactgcagctagtcacttaaccacactggtgttcaatttactgtctgtgtagtgaattgaacatacctacctcaatgcgtttttatgggaataaaacaagagtacaaacctatctgtccactagtggtattttttaccttaagtcacattccttcaccactaatagtggttaagttttctgactctcagtgatccattttcaaaaggccatctctgaaatttttgcctctactttctttaatggcatttccctatgtcactgcttaggtgatatgatttaggggaaagccatattttacttgagttaaagtcaagtttgtttgtgtttttttgtgggggggctggggtggattgttctcaaaatgatttactgacattctccagcataagttttaggtgaaagagtattctcaggtgggaaatttgagtaaatcttgaggaagaagtatattctttacaaatcatttagggaaaattctctttaaatagggggacctacttatgcatctgatttgcccgtgacactcattgtttacactttcacacctacataattattaataatgctcttttactttcaaaaatgtgtagtttgaataaggtgtatgaaccacctaattgaagaaagttacttgtcttaacctagaggttagctagctagcatcaagagtttaggggaccaaaaatggtaactctctaggaaataaaaagaggaattcatctacttctctgcagaagaggactggtaaatggactaactttgcattcaggttgtaattagacaaaacagaaagtgtgatcaataatgcaagtgcatagtggcagaagagagcatggtgaagtgagcctgtagacacacttgtgcaatatggggacagctctgatgtggcctgggctgtggaattcagtttagggggaagtgggttgggagtagtggtaaagatgaagtgagtggattgggccctggcttccggattacaaatgtacttttggaaaaacaagattttgaatagtgtgggtgtctatgtaattactaaacaaggacattttttagcttttggctcaagtgacaaagattttcctttcaaaagcattttgccagattgaaatctaaacataaacgtatgacaacattgctaccggtagctaattcagtgattcaacatgtctgtttatcaaacacttgagagcactttcaaagagccctggtttgggtatgaggtagagttttgtgaggcttcttttaaagcctctctgtctgagaaggaatatgctacttttcataccaccttgccagaaaggaaggcccagaacagaaagaacacaaaagaggtataaggggttaagggaacctggaaaaacctttgaaaagtaaattatcagtttagaaatgctctttaaatgtcaacaaagagtcagcaggcagtgtgtcagctctgcacctggccacatttcctatcctctgttgcaacttagtgaagctacgtggccaaactagagccaacggaacataagtgggagtgatatatgtaatttgggggcattttccacataaaataaaagctctttgccatggaatccctttgtctttccccttcccatgtgtggtcacaggaatgactatgacccaccttccaatcatgcagatgaggataatgcccaaggggataaacttttggggaaaaaatgagtccactcaccaatccatatttaaagacttatatgtgtggaagaaataagcttttgtgtgttttttagtcactctccttcagtctctatactacagcagttgaaatagaccttacataatacacaccctttctaggtacctacaggtcttctgcaaaagcagccatacaatcttcagattgtgaccaagttgcttttaaaattctcatccaggttgcctcttttttctctctcttggttgtagcaattctcatcagtagtgctgccaaagttgaatcctctttcgagcacatgcaaaaaaaaaaaaaaaaacaaaaaaaaaacccacgaaactaggaaaagcattagaattgccccatgtgaattccactcacatttcaaagccaatacatgtaaaagattaaatgaaaatatcccatctactgttatcacactctgctgtcttcaccaatgtgaactgagaataagagatggcagcttttcaatgtattgcctagattcctctggcttgtagtgctcccgtcatttctatttcctaccatgcttctgtgataaagcgagaaataatatgccaaaatgccactagcattcaatacagggtatgctgtcctctacaattagcatatttttttctgatagaccaagtgtttaggatgcaatgatttataggtccaggaaatatatagacagttgcttggatgaaagaagggtatgtaggaagttgactttgtgtactaataaatgccaaaaggtacattaggttaaggaaattatgtatgaaggagtctggcgataaattactgttgcatttttctgagttgaattgcttatgtgtctgtataaattgctaagcagaaaataggctaagagcattaaaactttagttaactcttatttcctcaggtctatgtaattttaaacttatttaggacaatagcccatttgttttacaaatcacagtgttcattgcaatatctttcaagctgaaagcactaaatcactttatattatggagacctggaagaatgcagcattatagcttggctggcagaacatgtatcagtgagatattgatctaaccaggaaaaagaaaagctgtgctgaatggactccacactgcaaggagtgttatctgcaggctgcagtgtttgttcaaatcccatattgctggaggtgaggtcatatatatatatatatatattttttgcaggcttcatatgattttagtgacagttatggccattttcttaatctgaaagattaagaaagttgtttgttgaagaatgtctgtagataattccttgacatcaggagtagctcacctttctgcaggaatgggttaaaatggaatgttgatcaaatgctctgacttcttaagtatggtttgtctatacttccaaacctgtatcacagaacccctctggaccctttggcaattcaaagtatcaacactgagacaaaggtgtagctgtcagtcggaggggatattgtgtagttgccttaagtagtgttttcctagaagacccctcagaagtaaagaaactgaaacagaagtaagacatgagtcttaattggattatgctgagattaggatactgtgtggctctgacttctcatctcactttcaaagaccgaggagacaggtgcatccgtaatttgcatggggtccaggaaggagccctgtgggaaagactcagctctgtgtacagttagcattaggctgttccaatatgactgattgacatggactgactgacagaaaggattaaagtcctggaaagagaacaacagaagtcattgccaggagggaatgaaatactgtaaggaagttaggaatctgccatgctgaggataaggaaatagagagctgtgtttgaacccatcttcattttgtcccttaggaatgcatgtgctatctggaaggataaactagaataatcatatcaccagaaacataagtgagtcagctgttcgattcactcctactaccaagagtagacctctagaggagcagcatatgcatggcaactagacctctgctcctggcgtagatgtgggcccctggtcagttttcataagtgcttattaaaagaataatggaatggtcatcagcaagctcctgttagggatccacttactgtcctgctggtacctgtgcactctatgataattcatatttggaactgttttattccctttattgtatgcagagggtattttgtgtggtcagagattcttccatgtgcctgccaagtgattattcacctttttattccaatatcctatgtataattgcacctacacactcccatacaaatcctaatgcagtgtataggctgtgtattgctatttagtatgctttgtctccagttgtgtctctgagcccaggtccccctccataacatcacactgtgctatttctccaacatgctggcagacacagagctaacaggaagcctaaacagagcatttccctttgggttgagcgtgagggggcttcttcttcctctctcatgtcacactctgcttggcatgctctccagtcctctaaggaacagatgcaggagcacatttacaaagcaggactacgatgagcgggcacccgcgaggcttgagatgtgcccagcctcctccctaggcaggctgccaaagcaaagctccctcatgtaatagcttgggcagataatgggtagacacaggaggaacaaatcaggaagcaaactcactgtgggcctgattcccatttagagggtgagacatccacagtctgggatagtgagaaatttatggaatgggctcttttttccatttctactctcttctttgctgtggttcctcaaacaccacttggtgcacagagctagggaaaagcaacagagcttctgaaatggcatttggctaaaacacccagccaatcttctatttttatttaattttcatatcagcagtattttattaaaaccattagtaaaatacagagaatatctaattttagaatgacagcattcaaaccatccgttacaaattgattttaattaatgtggtttgtcataattaataggttattttgactctccacagtagccttcatagtggtagatgaggacctgaggtcctctctcccacagctttgcaactgccaggtgttacattacaatggaagtaagtcttagcttgaactcttctgtgctgctgtggaatgaattatcggtctcaattcatcccttcccagtagtattaagcacaacctagccatgcttcatagtgggtccacaatttccccactttttgatttggggttcagatgtgtaacttgctttggtcaatggggagtctgcagataattggaagtagaggcctgaaatgggctcatgaattggaattgctttctcagtttctgtcaccaccatgagaagaacgtatgccagatagctgctgccaattcattgaaatgagaccctcaaagtacaacgcgtaaatgcaagatcagctgaaattcagctagcccacaattccctaagtcatgggaaatatggtgtaggtcactgatatatcaagcttgttgcacgttattgtggtaatagttaattgacgtacatatataccaacacataccagcaagtaagcacacagaaaattatacaaccaattctttcaggcactccaccaagcacattgcagatgtgaaaatatgatcagggcaggattctgctcacctgattgaaattcagggatagatccctcccttagtagactgtccatatgtcaggtacacacagctgggataatacctttatcctagttgtgtaaaaccagaataaataatatggacttatagtttatctgatctaggccgaagtcttttaaagtaaattatagacaatatggcattatatatctgtctatcttatcatctactcatccttccatcattcatccatccatctatccatttatccatccatccatcatccatccattcatcatccatccactcatccacccatccatccatctatccacccattcatccacttatgaatccaggcactgttgctttccacagtcatgtgggaatgtaaacatgaccaattaaagctgagtcagtgcaatgtgattttaataataaataggagaaattattattgccccatgacctttaaacatttttgtcaaaacattgaaaatgctcttaccattagatatagagaaataaaaaaatagaaagactaatatttatttagtaaaatgtaatttaagatactagaaacattaagaatttaagtattttatttctttattaaaatcttatcaggagcggtttgaacagggcttggctttttctcatggttatgtaatctgtagtatggagggaatgagttttttaagccttggcaaattgccatactcctttcaaagactggatgagtttccaatatcttatccttttgagattttcatggtgtgaaatatccccaagagttttcttaatgtgaagatttttttgctgtcctccctcgctgcctctggaacattttttttcatccttcttgtcactaccactttccatatttatatcaataactttccctttactaagttcctctagctgcataatggaagctcccaaatggcagaagtgccaatatttccaaggtcacctagtgctcctataatttcatttacatttaattcaaattccacttccagatttattactctttgtttctttgttgttctttcatctttattgaccagttccctttttcaattgtccatttgataaatgagtttatccctgggggaaaagggggcaacacagctacacacttgccgtctactcatgaacaaatatatgcacagcaaccaatcgctgactgacttagaaagaagtgatgtgattggtcattggtcatgaatctgttatttacatagtgatttgttgactgaagagctagcaaagaagtttgtagcttatgtaattacttgcaattaaggtaatggagtaacttaaatttgaactgtgttgttgggtgactggtgttatttaattaaactgtgctcagtgaggactgaccatatttatttgtccctctctcactctgtgtgtgtgtgtgtgcatgtggttaaactatggatttctaagtcttttttcctataaaggtaatagcaatgctttatagctgctggatatggtcacttaaagaatttgctatcaaccccttagaatctgttatcaaccctttagaatctgtagtctctgtttccaaatcacaggctctgtaacttttctcattcttgtctttctgtgagtctccaatgtcaggagaactgcctctcctgtgagctttgtgccttcctgttgtgtctgtcatccttctccccagcatggggcaattggtgtccctctgggagttttcagatagtaatttgcccatcttggaaggaaatggtctccctttggcctccttacttttctcagggtgtctgttctcttcttgcaaatgtctagactcctaagactattgcctccacagcctggaacttttaatgctaatattgtataatctggtttgccagacctcatgcctggtttagaatgctcatcgggaagaaaaaggtgctcccaaattatgtggataatcttgaagttgaattattatttagaatacaaaatgtatacattgaaaagcaaactcatcttgtaaggaaaggaaacatttgcatttcatagtgagaacatggtttgtctaagcaagaaataaaattaaacatagtgagccaattaggaagaaatgatctgaatatgtatcattgtgacaatattaactcatgacaatttctgcttgtcccattcagtatcttttagacatttctaatctagagtcagtgcaaaagccactggccagcttctaaatgccagggttttaaatgcctgtcaaaaatgaatttgttaccttattttttacaaggacactttgtaatgcaaaagggcaaaataccatactctcccaggaaatatgtggtaaggaggctaaaccaatatttttctttttaagatagataacatccctcttcacaaagagaaaagagtaactgttgtctcctctaaactatctttcagacgtttaatgagagccatcttatcccagcgagtaaaaggcaaataccagctgcctcctgagagaggggcaaagaaaggtcaaggaagacctcctgctgctggctttgggggcatctgctgtttttctcacccacaaagggcagtctgtctttgagcacttacagtgtatgcaaggagagtagcccagttctgacctgtcaatcactaggttagactctctctgaaactctcctttaggcaatggcatctaatctatgcaacagtcagagtgccagacacccagggcttgggctaggcttgcagggctcgctggagtggcccttggatcttagaactaacagaatcaagggaagtgggaaagccaaggccagactcagcagcagtagtcctgtgaaagagctagactatggggagagaaaccaaataggagctaacaggtcagctgtggacagcaagagaaagagagaggttttggaatgaagggaagtgattacaatctaggaaggttactgaaaacccagggcttgtttttcaataccttttgttaggtcaatatagcctctcccaaattttaaaaggagttttgaagagggctaagctaatttgaacaagtgagatcaaacaactttggttccaactgggatcttctagtcatcttggcttcgtgtatgtgtgtgtgtgtgtgtgtgtgtgtgtgtgtgtgtgagagagagagagagagagtatgagtgtgtgcctggcaacggtgaaatcagtaagaggttaacaagttcttttgtttccccagttgaatttaggcatagtaagtaaacaaaccgacattttaacatgtgcttcagaaaacgggaaaggtaaaagtcacttccaaaaggcccaagaaatgtgcacatttatagcaaagcaagggtgagtggaatttgagtacataatatagagaagcaaacctatggtagtaccaaaaattccgccagtgatcattcctgggcttcaggacctgccatgatgccctggaaatgaggcagaaggaatcagcttgagctgcttttccgacttgatgaaggcattcctcctactgcaagtttctcacccccacttaagtacagaaggaagcaggatacaccaattgcttagagtatttccaaaggatttaatgcaagactgtattgaaatatgctttaacaacttctacaatttctgagactatgacaagtgatagttaattttgacattgctgactgtggctgccatttattcttagcacagttattcattgtactatctggaatacatgcctcctttttagttaaattagaatcatgataattaacaaatatttttcattgaaaaagtacattcacctaataagcaaagaaacataaaagaccaaaatgactactgctatgatgaaagacaggataatttttttatttgttctagacgtaccaaatagaagggaattacaccaactcaaacccagggcacatgtaaataaataaaagtataatacaaaatatctttcttaagatgtcagaagaaaatttagctattctgaaactcaacagcagaaactgttgtatttcccatactaggagtatcaataggcaagtgtcttagttcgagctgctatctcagaatattatgcattgggtagttgatgaacaatagaaatttatttctcacagttctggagagtggatccctgagatcagggtgcctacatggcctggttctggtgagggtcctcctccaggttgcagactgccaacttctagttgtgtcttcactgggcagaaagataaatgtctaaatcccttcctcttcttaaaaagacactaatcctatcatagggggtttacccacaaaagcttcgcctcttagtaccatctaattgggggttagagtttcaacatattaattttgaggggacacaaatatgcaatctataacagcaaggcattgagagtggagatttatatgagccaaagcagaatcacagacaaatcatcaacatggttgttggcacataggcatttgctaattgtttcctttatttaatttagcatttggaaatatataaatttatctacagaaataggattatggaggcatctaaaactcctctgttgtacttctatgccattcaacaaatacctgctctctgaaagccttcaaattgatgtctgcccttaagggagatgaatgggagaagataactagcagtgagcaaacactatatctgatcgtttacagatattaaataatttaatcgctagaaaaagaaagcaaagcatagataacatatataattatcccacttttagagatgcagttcagagaatttaagtgataaaattatctagtaataaacagcattgtcagtaatgttagtaataaaatctgaaaatactaccacttatcaaccacacaccacgcagaaggacctgggctaagcactagatgtatattttatcctctcagcatccctgggtgttggctactgttatttaaattgcataggtgagaatatgaatggttcctaagaactgtgcttctcaaaattttatctacatacaaataaactactgatcttgttaaaatgcagcttcagattcactaggtctaggtagaacctgaggttctctgtttttaacaagcttcagatgacacacatgctgctgatccatggatcaaacagaaaagctggggttgagaggtgaagtaactcggtcaagtacatgaggcagattctttttttttttttttgagacagagtcttgctctgttgcccagtctggagtgcagtggtgtgatcataattcactgcaacctcaaactcctgggctcaggtgattctccctcctcagcctcctgagtagctaggacaataggcatgcaccaccacacctggctaattttttttaattttatttttaatagagatgaggtcttgctatgttgcccaagctggcctgaaactgctgagctcaagccatcctgctgcctcaggctgccaaagtactggaattaaccagcatgagccaccatgcctggcccagattgactctcagtggagaaaagatcaaactgttatttgtttagttcaaaattgcaagtgcatcttgccaccctgtgctatctcttccttgggtttggcaattcagcttagtggggagaatgagatgtgcacaaggatgactatgagactcagtactaatggcaacacactctcagacagaggcaaagaattccaccaccgtctctgccactcagggcttcctggaatgcagaatatctatgagtaattccaaatggataaatgaggatgattcccaaaaagaggtgtctggtaagctaaacctagaagactgaagaagattttacacataaacacataagaatgtatatgtgcatgtatttatatatgttatattgtatacatatgcaatataaatctataatatacaaaatttatacatacacatgtatatgggtgtgtagctatatataatgtatgtatataaattatatgtatatatgaatatgtatgtgtatattcacacacacattatatatagacacacacatatacatatattttgatatctatcttttgcttctagatagagagaagtatgcacagattctatacagtatgaggcaggatcacaggacagcttggtattttgaatgtactttgattccacagatcatgtagatcacacagtattttctcttcccttctcttacatgaggggcacccggatataggacacttagagtagcttattgatttgcttctctacttgttagtaaaatttttaataataggggctatggaattcttgatcttagaatacctagggccctagatcttgtcaattcacaaaaataattcatttgaattatttgatgttcttatttcagttttatttgaattaaattgcttttgatatttgcctttagtaattcaacctcattttcttaagatttataaagtttttatttggcattaatttggaaaatcagatatcgtaattaatttaaagtcatagaaaataaaaatatgagagcacctagaagtttgtaagatgatgttctattgctttattggctttactcagttatttaaaacaaagtttatatgcaataaaattagtataaaatccaactgatattgagaaatatcaacagtaattaatcaaattaggtttctatgataaaacctcattattaaatttgattttatttatgttgacattttctaagaaacatctttagaaagaaagcatttgaaatcttctgattataaatatttagcctcttatgttatcataagaggcatatctattttaaagaagccactgagaagctgtacattaattaagaatactatttattaagaataaatagtcatagaaataagggtgctggtagttatgattccccaaatagaatgtcacttctgttaaccacaatattcagccatgaaccttctgaaatttcaggccaagaagaaaataaagtcatgtctatagctgtgcctagttagtaatcagaaggttgagtttgggggaaaaaacaagcttttctccttttctaaccaaagaagttgtttttatttggtgtttgtttatttattttcagctgttgctcaagcaggttcctcaggtacagactgacccacacagtataacaggccagatggtacgactttagaactttaagtcatatttactatgtgagaatttttttactcatttatttccttcttcatctttccagggacagcctgtgaattgtgcagtgaattctttcagtatcactaacctgaatctttttataatatcctcttttacctaaattttaaaagaaatcaataaaacttttagttattatttggcattcagaattagattcaaatacgtctatgtgggtgcctgtgcgtgtgtgagtgtgtgtacctgctggtaaagacactgaagacatcattccagcaaaaattgatcactgtgtttttggatttggtcccaagttattttctgtgagatcctctttctcatttttgcttttgattttgacagaaatgacagctgaaatgtatctcaataattgagtttttaactttttttaaaaagatagcttactcaaagcaactgttgttcatagctgttgtaatttaaaggaatctatgtgatctttgcaaaaataactttcctaggatgaggtcaagaatgagtaatgtacaaccacagaaaagacgtgacatgccttcttgtctgaaacacgtgaagacacaaggaagccttcatgctaggtaattatttccagaggagcttccatgggacttcataaaagcattgacttaatgatgaaatattgactctattttctcagtgaacactctattcatttgagcatcccatcattcaaaccttgtaaatcctttcacagtcttcgggaatagggtccagattgtcatccgcatcttgtcttcagcagcaaaaaaatacacactcctcccccactcagagaaactgccctttagccaacattttgtgtcatttaattatttgcaagattcattaattggcaacagcccttccagattttccttagaattaacaatattccactataatttatagattatgtgtcactcttcttcctcagcttgaaaagggcatacatatttcaaaatcacttttgaatcttgaaatttaaacattttccccaatgacatctattttaatgcacatgatttaaaacatgagcttttgatataaaataaagatagtttgaaagaaaaatagcagcctctaagttttcatatggttcttcctcctggggatatttctagaattgaaaacacttaagagggtgcagaattctttgtcgagtgcttgcttttgcttatttagaaatagagggacaatggcagagaggggtatgaactctcctttatcagacctgccttctgggctcatttctatatcttatcaataatatgactttggacatacaattccaaatctctaggtcgtagttttcccatctgtaaaatgggaaaaccctcaacctcaacaaattttttggggggttaaaagtgaactaatatatgaaaaacaattttgtatgccctgaattatttatggaattttgtaacttgaggtttgctgacctaagttgtgaggttaaaggtttagatattggaattatactaacttctaggctgaaagtgagctctgccattcatgctcaagactgtttgctttctgacattttaggtttttattctttccaagtatttatcacaattagggagaaggcattcaaaccttagtataaatggttaatctgaatacagactaggaagacttgggtcattcaaattcacaaacctgtgtaagactgcattgctcaccccttcgggatggtttttcttggtactcattggactgcaaagggtagcacggtactgtgccaccccaagacgaccttagtaagaagcctgggtaggatgcagctgttcaggggctagtgtctgctgggactatgaggttctaatttaacctcacctaatgtctcacttctattattatccaattttacagccagtccatgtgaggcacagccttgccaaagttacatgactaaatagagaagctgcgatttagaaccacattttctcactccaaatcttgctatctcaatcattatattgtaccttatttgctgaatgaatgattgaatgaatgaatgaaggatgaatgggtaataaatagagagacattttactacataaaagctttcctaagttatgggaaaatatttctgagatagttatttctgtatatttgctaagggattagtaattttcaaagttaggatgccacatgtcataactggagtctattacagttaatcttatggggtctgagttaatgcgctataatgaacatggttgtaaacagaaaggacacccatttttgcattaaatgccattagctggtctgagagcaccttgagattatgacatactcctcattttgccatttttttccctgtcagcatggagcacaggttctggtagagcgagagtgctttacaaagacttgctgaggatgagtggattaaatctttcactcatccaaccgcttaagtccctgctgcactgagttaggagctgggtctagagtggtgagagaatgatccacaatttctgttctgatgaatatttggaacaaatgaaggagtgctccaaaggaaattgggatggtgtgtggttgaggacaatgagggtactaaacaaagtgaaaaagacctcagaaaagtggtcgaacgaggcctctcttggcaagtcacatattatattagatatgtgaaggtgatgtttgaaggaagagagtgaattagaaggatgtgtgcataccaggggcaagcgcatctaagggagagcagcccttgcaaagaccctgtgctgagagtggcatgctttgcctgagaacctcaagaatggccatggtggctggaacaaagtgagtgaagggtagagtaggaagagatcacgtgttaatggcatgacagagattgttcatgaaagtaccttttctatctttggaatgatctcagtagtttgttttttttttttttgaaatggagtctcgctctgtagcccaggctggagtgtgcagtggcatgatcttggctcactgcaacctccccctcctgggttcaagtgattctcatgcctcaacctcctgatgcacacctgagtagcagggactacaggtgtgcatcaccccacctggctaatttttgtatttttagtagaaacggaattttgccatgtcggccagactggtctcaaacttctgacctcaggtgatccacccgcctcagcctcccaaagtgctgggattacaggcgtgagccacagcgcctagcctggagtgatctcattctttttgcttagaaagattattaaaatatttcgcaaatgattggaccctgagtagattggcaagttaacttacagaactaggtttgagaaagtttttctctcagatttgaattgatttgcttgaatcatttttttttctaattttgtccaaccattagctctggaatatggtacattaaaaacaatttgcattgctccattgctgctaatatcaaggtcaatattgtcaaaaggcatggagatagaaggtcaagatgatgcctcaaacagcatcagtaatttaggacagcctgtcacaagagttaaagtgattgataagcaggaagaagtatgaacaattcattataaaggggactggatgacttagatgttaagcctactttaattttctgcatagcaattatattgctgattcacatatgaaagtattaggagacttgggataattgcagctgaggacacatcttttccattgttcgtgggacataactaaattctctgataaattaatcatagaacttatgggaaataatttaaacagcaacaacaatgataatacctcatatctctacagcacattgttgccttcagagcactttcaggtaggccattagacaaaccagtgagggagaaaaagactggcctgggaaagttaaatgaccctggttccactgaaagttcatggaaatgcagatcttgtgttaatcatgtcttctccttcagtcacttctcaattctacctcaaaagctcagactcttaaaggtttcacaccttgccttgcattatgtgcttgaagcccagcaataacactggaacttgggtaatgcagatatcgattgcccaatttacagacaaagaaactgagttgcagggaggtaatgtgacttcagtcagagaaagtgatagaatactacattctgactcctgaggattttttttcttattaatattttgagtacataaaaattgtctaatcccatgagcttgggagcttgttgacttagaaactaggtcttttgtacattgagacaggtaccgttttcctctatccaaagacaaaattgaattattttctgttacgactattctctaggatgtaatttatttttagggacctttcatttccagacttccagaagattcaaattggaatcttcttatcatcattactattctttttattattttcatatccagggtgtctataaatcctcttattttttttcttgttctactttccccagtaaataaccttttgtaagaaccacccacccccgcccccaccattccagtgtctttttattttattttttttccagtgtcttttattttgatcctgcttcaattttagaagatcacaataagaaataacatggggagagcagacctaatagagattaggatccatcattagacataaatgagacacagaagagaacaattaaaattggaatcctacaggtatgaactgttaccatataatgtttttttaaaggtgttagcctttctcatccttaaattgccttcaacaggaattctctttttggaatatgtaaaccatgggtgggatacagaagtaacctactctaaatggaagggcaaagtggtgataagattgggtttttgaatcagataatcttgagttcaaacctcaactctatcacttatgaatttgtgattgtgtaaaagttaaggaacctctgtgtggtagttaactcttctgtcaaatgggaaaatgactttgtccctcataaagaaggtgtgaagagaataaagacacacaaaataatgccttactgtgcttagtttagcttacagatggatttatgtcaaccctagatgtgcgtgggtggacagctgatcactgttattttgcttttatgactactgtatactgaacgctcactctgccaggcaatctgaatggagctagacattcagtggagaatgaaagacattagatccctctcctcatgaagtttacatgttaaaatagaaaaatataggccgggtgtggtggctcatgcctataatcccagcactttgggaggccaaggcaggtggatcatgaggtcaggagttcaagaccagcctggccaacatggtgaaaccctgtctctactaaaaatacaaaaattagtcaggcatgatggtgcgtgcctctagtgccagctactcaggaggctgaggcaggagaattgcttgaggtgagctaagatcacaccactgcactccagcctgtgtgacagagcaagactacatcgagagagagagagagagagagagagagagagagagagacagaaagaaagaaagaaagaaagaaagaaagaaagaaagaaagaaagaaagaaagaaagaaaagaaaaagaaaagtaacaatttggaaatgtacttcgaaggaaactaataagatgttattacagaaaacagaaaggacaggtacttaaagtggtcagagaaggccttttgagaggatgccccaaaaagagtatacatcgtgtaatcaaatactgtggtcaagactgttcagcacagtgcatatcctgtgcaaaggctctgagatgtgatcaaaaccacttaaaactgatgtatcatcaaggagttcatgattcaattcaactctccttaagtaaaagatgaatgtacctttttcagacatgatattttaactagctcatgaaatagatcaatttagcacaagaagtatcttttcacatgaagttaaatggttaaatttataaagttattacatattacaaatctatactccaattcttgatgaacgtttcaagaacatgttgacttttctcaaggaaaatgacaaaactatacatttcatatatatattatatatatatatatattcttatttatttatttatttattcttctgtgattttcctcagtggcatttgctaatcatctagtccaggaaagctcttgggaaaactatttatgtaaggtagataccatgataataataacgcaagagagaggaagtcacatagactaagagtggttctgtatttccaaggaggaatacattatttattgctgagaatttatgaaaaattttgcagaataggaaatctataagtcctaattctataaacatgatgaggaaacttttccacatgtggaatttcattttaataagtgactatatataatgccatatatcagcattatgcttagactggcacagagggtgtctgaagggaaatgatagatggggaaacctaggtggccccatgtaataggggatctgtattttaagaagtttaggcctttttattttatggcagggagaattcagtccaaaaactatggaaggtttacggttagaatgaaaattttctgagcaagttatcaagactatctaccaattacttcaataattaggcctaaagtaaagcatttctgaattagataagtcatttttatttgtacagaagaacacttcattaatatatttcaaaccaatggcaggtttacaagttatttaatagtggcatataagcataaagcagttggaagaaaccaatagtgatttggataatgcttgtgtatatattttcaaacttatttataaataataaattagcactccattaagaacacatgagatcatgatttggggagtggaaagggagggaacccatgcccggataaacaaagagtctaatgaatctaatgagtctgagctgggtagaaaatattaatagtagtcaacattctttcatgaaggacgtgggataaaaatgtgtccattatttgtgctggatgctgagtggtctggatggctcattgtcagaaaaaacaactttcttcactgcttttttgttctagtaactcttgctgtataatacgttagcccaaaacttagtggtgtgaaacaactgttttattttgctcatgatttttggcttatgaattataaaagaacccaggtggacagttctctcttgggatccctcacactgttgcagtcaaacattttctgggctgtggttgattggcctgctcatataagatggtttactcaggtggctggcagttgatgctggctgtcagctggaaactcagctggtgttgtcagccaaagcatctacatgtggctttgtcagctttgtattcttaaaataatcagacttcttatgtggcaactggcttcccaccctgagcaagcgccccaagagaccagagggtagctgagcctgcatggtcttctgtgacccagccttagtagtcacccagggtcaattccttcataccgtattgttgaaagcagttagtctacccaggcccaaagagaagaaacatagagtccaactccttgtaaaaagagaattaaggtttttgtttggtaaagatgatgactgctacagatttcttaatgatttgtggtcattaagaaatctatggctgggcgtggtggctcacgcctgtaattccagcacttttggaggccgaggtggatcttatcttatgtattattatattctaaacataatataatggggaccatttcttaatgaaggcattgataatgaagacctcaaaaatacatggagggatgccacgacatagttgaactctgatacattatgtaaatgaaagaaaccattcagaaaaggccacatactgtatgagtccatatatacatatatatatatatgtatatatatataaataaaatgtccagaatacacagaaaccacagagacagaaaatagattagtggtggctaaggggtggagggaaggggaaaatggggaatgactgataataggtatgggatttgggggagaagagtgatgagaggttgatggttgtacaaccttctgaatattgtacaaccttctgaatattgtaaaaccagtgaattgtataatttaaaagggcaaatgtttgtgatatccaaatgtatcttttcttttcttgtatctcaagaaaagaagaagttcacagatgaatttctaaaatctcaaaatactgtgttatcaattccaaaattaatattcttgcatacgttagcactctggaattagtctcatgatagctgtgtgattgttttctctctcagtagtacacaaagtgatgttgtatcataaaattcactacattttaaagttgataaaatatggtatatttctgattttacttatcaccagatacaaaggtaactattgcaaatctgtatttcaaagaatttacactggacaaattgttggatagatttgcctcaggctcctgagcagctgggattataggcaccaccaccatccctgactaatttttgtatttttagtacggacaggatttcagcatgtaagccaggctggtctcgaactcctgacctcaggtgatctacctgcttcagcttcccaaagtgctgggattacaggggattacaaagtgctgggccgctcctggcccagtgttttttacttgatatttataaggaggaaaggaaggaagaaagaggagaaaaagaaggaggaaagatgagggaaagataggacaggtggaaggaaagactgattttaccaaatgacgtttgtttgtttttgtctaccttaattcaaaacaagctcttgctgggaggaatggaggctgaggaagccatgaccaaaagtataattagtatcactgcaacgagctggggtaacctcaggcatgtctcagagcctctgtcgtcctcaaacatcaaatgaaggcatcaacaattgcaaacgttcaaatctactgatatttcctccactccttagttgttctttgtctagaaaactccagcctaatctttggactctgaacactcatcagaaaactatgatgtctctcttaagctctcagacatttgagtatttactctgagttctaagtgaataactgtttgagaatgagtccttcactaaattgtaagatgctccggggtcagaaaaaggctattatcttcacaactgtggcttctgacaattgtttggccaagtgctcagttagtatgaatggagggaattaaggtggggccttagcgcaccagaaattccatatcttaggttttaggtaacagaggcctaaattctggcagagcagtaatagaaagaaagttaaacatgtggctgagagaaatcaagagagatgggaaaaagaaagcgagataaactgagtccttattataggaaaaagttgattctattaatccaagcaaagtcaagaagaagaatgagtctggagtataattctctggagtggcataggagccattagcatgattttacgtttcatgtggataaccattttaaaaatgtcagtagttgtgtcttaatgtgttatagtaagaaaaaaaactaacacatcaaatttgtgatattacagttaatgtttcctaagagtgggcaaataatgacagggaattgttttaattcagttgaaagaattataatgataggtaaatgtaggtatacattgggaacgttgtggtttcagtttccagaggtttgagaccactgcaataaagaaaatggtgcaataaagcaagtgactagaaatgtttgttttcccagtgcatatacaagttatgtttacactatactgtagtctataaaatatgcaatagcatcatgtcaaaaaatgtacatatcctaattaaaaaacactttattgattaaaaaaaggtaacaatcatgtgagccttcagtgagttataatccttttgctggtggggagtcctacctcaatgttgatggctgctgactgatcagggtggtggttgctgaaggttagggtggctttgtcagtttcttaaaataagacaacaatgaagtttactgtatcatttgactcttcctttcacaaaatatttctctgtagcatgtgatgttgcttaatagcattttacctacagcagaactgctttcaaaattggagtcaatcctctcaactactgccactactttatcaaataagtttgtgcaatattctaaatcctgtgttgtcacttcaacaatgttcacagcatcttcaacaggtgtagatttcatctaacaaacaaacaaaaaaacactttcttagctcttccctaagaaacaatgcattatttgttcaactttttcatgagattgcagcaattcaatcatgtcttcctgctgtacttctaattctagttctcttgccattttcactacatctgcagttacttcctccactgaagtcttgaacccctcaaaatcatccatgagagttggaatcaacttctttccaacctttgttattgttgatattttgactatagatccttaatagtcttaatggcatctaaaatggtgaatactttccagaaggttttcaatttacattgcccagatccatcagaggaatcactatctatggcacctagggccttatgaaacgtatttcttagataataaaatttgaaagttgaaattactttttgatccatgggctgtggaatggatgttgtattagcaggcatgaaatcaacattaatcttggagctctggggtgaccaggtgcaattgtcaatgaacagtaatattttaaaaagaatctttctttgtgtgagcagtaggtctcaatagtgggcttaaaattagtaaaccatgctgtaaacagatatgctgccatccaggctttgccattctatttatagagcacaggaagagtagatttaacataattcttaatgaccttacagtttccggaatgataaatgaaccttggcttcaacttaaagtaaccagctgcattatgtaacaagagagtcagcggttcctttgaaattttaaagccagtcattgacttctctctagctatgagggttttagatggcatcccttccattaaaaagctgtttcatccatattgaaaacctgttgtttattgtagccaccttcatcaattatcttagctagatcttcttgattacttgctgttccttctacatcaacatttgctgtttcacatgtacttttattttatggagatggcttctttccttaaacctcgtgaagcaacctctgctggttcccaacttttcttctgcagcctcctcacctctctcggccttcatagaattgaagagagttaaggctttcttgtggataaagctttggtttagggtaatgttgtggctcgtttgatcttctattcagaccactaaaactttctccatattagcaataaggcttttttgctttcttattatctgtgtgttcattggagtagcacttttaattttcctcaggaacttttcctttgcattcacaacttggctcaatgtttagcacaaggagcctggatttccacctgtctcagcttttgacatgcctccctcactaagcttaatcatttccagcattaggttaaaagtgagagagaatgtgactcttccttttgcttgctcacacagaggcggttgtaagtttattaattggcctaattttaatattgtgtgtcaggaaataggtagactgagaagagggagagagaaagggaatggctggttggtgaagcagtcagaacacacataacatttattgattaatgtcactgtcttatatgggcatggtttgtgctgcaccaagacatttacggtagtaacctcttaaagatcaggattacagatcatcataacagatataaaaatcatgaaaaagtttgagatattaagagagttaatgaaagacacacaaagacaggaagtgagcacatgccgttggtaaaatggcactgatataaacttcctcgatgcagggttgtcacaaacctttaatttgtaaaaaactcagtatctgcaaattgcaatcaagtgaagcacaataaaataagctatacctttagggtccaatctgtggagaaaggaatgaataaatatggttatatcaatcagggttcccccaagagacaaaaccaacagaagatatatgtgtgtgagcacacagagagagagagatgattgattttgattttaaggaattgactcatataattgagtgttggcaagttcaaagcctgtaggcagaccagcaggctgaaaacaggaaggattcttgtattacagtcttgaggaagaactccttctttctgaaaaccctcagtttttgctcttaaggccttcaactgatcggatgaggctcactcatcacccattatcaaggataatctcttttatttaaatcaactgatcataaatattaatcaactctataaaataccttattagcaacatcaaaactactatttcaccaaacaactgagcaccatcatttagccaaattgacattaaaattaaccattccagagggaaacatttggtgaggtcagatttacaaataatgagttgcagatactgctggattatatgggtaaaaatgctcagtgaagtcttagaaatgaaagcaattcatgagcaatcaatctgccttcactttttcacctatttttattcagaaagtcacttagtctggaaaatgtcgttcatatggttgcatgccctattgttaagtgaatgagtgtttcaagggctttcctgttaggtttatttcatttagctctgttgcagcattacgatgtaagtgcttaccacaaaggtttgctaatgagtgcccttaatttgtattcagatgggagcaaagagaaggaaaaatacacaagaaggagtcttgtaattatgctacataaaattattaggcaatttagaaaattgtcagtgggaaactgcccatcatgcataaaaataattttgattttgatgtacagagtttaatgtaagagtgattgtagggagaccatgttattaatttttcccttaattatccaagcacacttgaatttattttaaggaaagtgatactttataaagttgagtcacgctactccagagaatacttgttttcgttctgtgacaaagtttattttgcagggcttgctgtgaactgtataattggtaggacgtgaaagaaccattaattatgtccttccccttcccctaatcataaataacaaaatgatgctatattttctggcaaactaaagtatatgtgatgtaaagatgttcaggtaatttgtgggcttatctattgtcttaaatatagaactacttttcactcatttttggcatacacagttgtgtattcagataattgtcagtgcaatgctaaatgtgttatgttaaaaaatgatgaacatattacctctcagttcttgttatagataatttcttgcaaattttaagctagagatagtcaatatttaatcagagaacatcttcccaggattcaaagtataccacatcagctgttgaatgcagttaatttgcattaatgtgttacaaatcaatgttctgtagtattttaggaactgtaaaacatacctttcaagacaaagtccaaactctttagtatgcaatatgtagttaacctattctggaatgtctcttctaactgagagccaccctgtagggaattaccttagtcttttaattcctgtttgtatcaggtgacttagcaaccacctgcatagcaggaagacggcaccaaggaatatattcatccccttacatagtttgaactatgtgaccaagaaattacagtccatttgtatagagtgccaagctctgaaggctggaagacatgtaagttcatgtataagcataagaaggttgtccatagaatgaaaagagaggaggagagagttaagggccatctgggctcccagagaaagtgagctcaggtcccctttgggccctaaggatgaaacaactgccctttgcctggattcacttgactgggttctttgctgtcattggtagacacatagagccctcctgtctgctttagtcttgttctaccttctcagcctcatatagcaatacctcttatattctgcccccacccaccctgaccatctcagtgatttttgaataaatcttgtctttcactcgcctctgcctttgcgtagaggatacctgctgtgcaaaggtgatgtgagaaagtcaggtctaaattcacctccagactctgcctttggtgggctgtgtaatattatgcacatcacttcaatccttagatttctcatgtctagtatggaggaaatagtacttaacatggagacttttcaggaaaattaagtgaggtattatccacacagccctcataatggtgcccaacactgtggttatcaatagattttagtaccatttttgccagaaagttgaggcagattctaatccaacttttaatatccagatctatccattattccctgattcagtccccaaggtcactcattctttcccttcagctccacaaaaaatccacttacaaatattttatacactaaatcacatcataatcattatggatttctccaaaattaaagtaacaactttttctggttctctgaaaatatgaataaaagaggctgataatgctgcatgcccagaggtgaacatggttcaataagagagagagaccttgtggaagtgatgctggaattgaaatccaaggattgagtagtggcaatggaagaagagaatagtattccaggcaaaatacatggatatagattccaggggaattatgtatgaagaaggagcatagtgaaacttaggccctgcaaggccagtgcagcagagataagcctgtttccttgggtaatggtagggactgtagggcacagtgaacagtgtttatgtcattctataaataatactgataggaccacttattgagtacttcttacatgccagaagttctttggtgctttcattacattaacttatgctattgtccacagtattctaaggtggttgctattagatttccaattttacagaaggggaaactgaggcacggggcggtgaagtaactcccagaatgttcacagtcagcgaaatggtggattctgaatacaaatgaacacaatgaggctccaggtttcctgcttattatcaccgcgaagcccagcctcagcgagcaagggaaggagctagagagcgggctcccaggcacatctgcatgtgtgcactggccttgtaacatcagtctggctcttaagagctgatcagaaagaggacagaaggggagctggcacactggttaggtgaaatgagaaagctcaatgagtgatgatggtaattcagactagaatagttagtgttattttgtgaaaggaaatttcaatttaaccagagcaccttgaagtgaaggctttgaattggaaagaaggttttaaattgctatcagaatttgccattttagtgattgaaacattttagggccaaatgtgccatgctgcacctttccagaaggaactatttgagggaaataactgtcagctcctatagtaccagtgtttaaaatgtaagtttagggagaaaggcagttcaccttctctccaggtggggactgactgaggtgttgaacaaccagatttggggatggtattttttgaatttaattaactgctacatgtgaactagtaagatcaaatcacccacaaggtagatatttgagaaactcagtgtaaatgtggaaaagttgatgttatgttccaaagatgtaataaaaaattaaccagtttatgcaaatgtttatgcaaattaaccagtttatgcaaatgtttatgcaaattaaccagtttatgcaaatgaaaagaggaggtaagaaggtataagatgctatgtttgcatcattcactgggaacatttgaactttgcagattaatgtccttggtggaagaagttatgacattatgttatttgttggggaaaaaccctccagtgtaaagacttttatttatttatttattaaaggcaggatctcactctgttgcctaggctggagtgcagcagtttgatcatagcttactgtagcctcaaattccagggctcaagcaatcctgcctcctcagcctcctgagtagctagtacaatacatgccaccatgccctgctaatatttttttcttttttttttggagacagagtctccctatgttgcctaagctggtctcaaactcctggtcttaggcaatcctcgcacctcaggctccctcagcactggattacagaatacttaaaaataacataaatcagtcagatatttaagcctcacaaacttttcctgaagatttactgagctacttcttcagatgaaaaagacattttgtaataaatggtttctgaaaaaccaaaccctcaaaattgtaactgggatggatatgattagtgaaacacattaaacttaaccctacagggataaaccaagagcgctactgatgtttataaggaaatacaagcattacatcttaaactagacaagtttccactgctgagctaccctgagcttagtgaaattaactattttcacaaaatggaaatccattaatggaaatgacatcataaattcagaaaagattcttagattttaatatacttttcctaatttaaggcaaattgagccaccaagaattgaaagagaacatatttggataattgaaaggcagagtttaaacattccggaaataactatctgcactttcaaatgcaaggtcttgcttaggtttggaacaacacaggttttcttgatcacttgtctaaaacagtaactgagagccacacaacacaacctcgttttataaaggttgtctctgatacttagaaaaatctaaatgtttctgtacttttgcaagttactaaagtctttccattaaattatttgacttttttttctcccgcccaaaaagtgattagcgcacaacaaaatgtgtgtgatttgttaatggagtattctttcattgcagatttatatgttcttaaaacagtgcaagccttttgtggaaataatgtattttgaaatcatatattcttatatacatgtctctaaaagttcatcaaataaaacgtaggaatagacatttttacaaacagaaaacagtcatgtggttctgctatccaaacacagtgacatgatcttttagagtttattttcagtcttttacatattgaccctgtttttcctccatatttgtattcttttaggtttgtttacagagttgtaatagagcatttgtgtgaagcagtttatatggtaagtgacagaaattcagctcagagacactaatatactcacaggatgtattggtctatattgttcctctaggaaggtgtgatccagaaactcaagagaagtcatcaaggactcagtctctctacatatttttcttcctttataagtaaatggcctgcaaatcttttctcatttctgccgctctccctgaaggacctggtagagtacttccttttgaaatatctggctgcagttggcctatagctcagtctgggtttctggcttgttctgtgcatttgtttttcgtgcttcaattagccattgtgtcctggtaatggaaggaaacaatcctcagagatcttgtcacactaagtctgtggcacaatttgaaacattcagtaataccagctgttctaagcagaacagaagtcataattagggatgcaatgatttcacactaaactgtagttacagaatatataactacattttaatgctcatcaatttttatcttatactgtatttatcttcaaagaacaaatgaaccaagtgaattggatttcagatacacagagctggatttatctaatattccctttctcatcttctgctgtaaaaaaattatttcttcttatgtaaactacctaagaagtatcttttcctcccagaatactgtagctttgtctgctcaaatccaaattatataaaatggcaaagctgctctggaacacattttggctgtttaatacacagttaaacatacaatttccatgtgacctcatcatcccacatccaggaaattatcctaaagaaataaaattgatgttcatgtataaacctgcttaataattttttagaaaagtaccattgccaagaactggaaacaacccaaatttccttcagtgggagaatggacaaaaactatggtatatgcataaaatggacaataaaaagggaaaaattattgatatgtgcaatctggataaatctgtagaggcatcagtataagtgactgtagctagattaaatactttgtaattccatttatgacattctgaaaatgtaaaagtatagggacagattggagattgccagggattggcagtgacagaagggtgtgttaattacaggggcagcatgaggcatttctttatggtgctgggatcatcagtatctgtttgtgctggtggttgcaagaatcttcatatgggctaaaactcatacaactgtatagcaataatgtgaatattactgactgttaaataagatatctatgagtgaaccttcactaggcaaataaaataaataagtattaacacctgtgactcatatctgttgtcattttccaaagcttgaagcccagcataacatcatgcttggttttccaattcatcatgcttttgatctttgtatgacacatgcagaatttgggaaacatcttgggagataatgagtttttagtaatttgggagataatgagtgctatgttgggataagttaacacttgttttgttaaatattacatggaagggaatagagaaaaagtctatgcggcaacaatgatgtactcttagcatgacacatggaagcttatgaaaaattattaaagactttgcactcagttaccaaaaaaaaagtctattatgtaagagatctggatcacccccagcagatgtagggctgaattgttggttgctgttcatctgtaaaaaatgaatttcccaaatgcttctctagtgcttattcagctctgcttagagaagttttatccttgcatttatttttttcttttcgtggccatagtgagaatggtattaagaactgggctaagccccagttctgcatctgcttgctcctttaaattagtgagagcaagctcattctagttcagttcctgagtagctgtaattaatggtttgtagtattcacatggcttttgaaaaggacccctttctctctttaaagcacctttaaactttctagaaaaaaaccatgtaatactgccttgaaaacagtcccttctgggtgtcatttcaactactttcggttcaacttcaagttgtccagggaaaataaacccatcaagtagtgcctgcattgttagcttgagaaccagaaggaacttcgaccacatttgcttttgagaatgtaataatttacatgtgatatatgatcgtttagttaagcaacagtgatacagaggagcttcaccttggcctcatccattgattgtgcagatttcaatacacttgtttaagctttgtggatgtggttgttcattcaatcaacagaagtttacttttgcctatcctggaccagaaatcagacataagctcaggatattaaaagatgcttatatgtgtgtttggggaaagggataagaaaatgtagagaaaacagagaaaagtacatgttgtgagatatgtttgataaaatctgggttgatcaaatttaaacaagattccagaatttgtaatgtattaatatgcacaatgacctttcaagaatggaatctaatgtgcaatgattctcaaatctctctgactgggaaagcccctgttaatttttctcagagaactttataattgtagtatccttttctacacactttgcaaaatgtatggatgttagcaaaaaaaaattatcttttatgtattgattattatcagcaatgcttcttactgcctcagagccagagaaattgcaagcagtgcctgaagtgttgtttgccaagcttctggtaacatacaacattgttttttgttttgttttgttttgaattactgtttatcaaatagaaatttagctatgtcagtggtcagaattgtggaaatagtatacatacaaacttgttttgttttgggaagaactagatgattaaggcagctttgctatgtggtaaattatattttatgcctgggtaacagttgtcaactaaaaatgggagatttgctgtcagaacttgttgagagtggcatgctcagtgtataagtaggtttcctgccataactacattgagtatatgcattatataaatgatatatgagtttttagtaatttgaagagaaatgtaatacctaaatacattttcctttctgttacttaccccatatagttttgcaacatttagtgccaagctaaggtgacttttgattattgaattaacttcttaattccaaagagtttgtgcacatcaatagaattttgttcaaataaattagactatagactaaaaacaatttctagaaaaacatgttggcttgccacttaagattatttctctgatgtctaaaacaaattgaaacttagtttcaatgtagcattgtatttaatataatcataatttcaactgttttaggaaaatattttattaataaaccaccatagtccatcaaacagataatctgtattatactagcatgttagcttaaaatgattttgtatatattatcgttataattatatatatctaatgattgaagaaagagaactgatccactacattgttgttgaaagtgaatttagaatgagttatatgttaatgcaatcttgctatctttggctgattctggaaggagttgaaaccttaattgatcaatcacttgattcagctgaaacttagagtgaagatttaaagtgttcttaatttgatcaaaatggcaatttttttttctgaatccaatatgtggagggaaacacaaggaaacagtaattaccattatgaaagtttcatgaaattatggtgacacttttaagtctattttttaaagagctttattgagaaacaattcacatactatgtaatcccccttttaaagtgggtcatttaaaggtgttgatattcacatagcagtgcaatcaccgccactatttaattttagcatattttcatcactcagaaagaaacctcataccattagctgttagtctacattcgcccattttccataacctgacaaccactaatctacgtatgtatttgtctagtatggacatttcatacaaattgaatcctacaacatgtgatcatttgtccctggcttctttaaattaacaaaattctttcaaagtttatccgtgttgtagcatgaagtacttcagccttttatgagtgaataatattccattgtatgggtatatcagattttctttattcattcatcagctgatggacatttggcttgtatctacattttagctatggtgactaatgcttctatagacatttgcccaaaagtttttgtatggacatattttttcacttcttttgagcatgtaccctagggatggaattgctggatcacatggtaattctgcatttaacatcttcagtaactgccaaactgttttctgttttgcaaagtggctctagcattttaaatcccaccagcaaaaatgtgaggggaccaatttctctatatcttcatccacagttattattgtctgccttttttgatattaatcatcctattggatgtgaagtggcacctcattgaggttttgatgtgcatttcttgatgaatgataatgagcactttttgtatgcttattggccatttatgcatttttggagtaatatttttcaaattattttcctatttaaaaattgggtgatttgtgtttttatcattattatatgacattttcatatgttcaggatacaaatcccttttgaggcatatgacatccaaatatttatccattttgtgaattatcttttcattttataaaattgtatcctttaaagtgcaaaagagttaattttgacaaagttaaatttacacatttcttttttattgttgctgaccttttgttgttatttctagtaaactatcacctaactcgaggacacaaagatttactcctatgcttcttttaaaatttttatagttttagctcttacatttaggtctatgatctattttgagttaactcttcatatggtatgaggtcaggttccaaatttattcttttggatgtgggtatctagttgtctcagcagtttatttaaaaaaaaattctttcctccactgaattgtcttagcacccatatagaaaatcaattgaccataaatgcaaagatttatttctagactctcaaatctattccattgatctatatgtatattgaaatacaaattccataggtcttgattgctgtgttgattactgcaagtttgtaacaagtattgaaattatgaagtgtgggtcctctgctttgttctttctcaagattgtttggttattctggaatcttgaaattctctacgaacttaggattaacttttcaattttggcaaaaaggccagctggggttacagtagggatcacattgaatctgctcatcaacttggggactatagatattataacaatattaagtcttctgattcattacattgggtctcatttcaaatatttaggctttcttaattttttcaacaatgtttgttgcataatggaagacttgtattgtttttcttaagtttgtttttaagtattttatttgtaatgctattttaaatggaggttttttttttagagtttccatttctctgcttgcattacccatctgcttttgtatgttgtccttttcttttccccattagaactcttagcaaattaatcatagttattttaaatttctgttctgctaattccaaaatgtgtattatatctaagtcttgttttaacgcatgctttgtctcttcaggctgtgttttttatttgtttatttgttttcttttggtgtgacttgtaattattttgttgaaagccacacacggtgtattggataataagaactgagaacattagtctttgattgagattttatgttcatttgccaagcaaatgtgtttactgtttgttgtagttatgatttcagacactaaatttttatctaatgttgtgtttgagtcttgcctgttgtctttgggttctcctagagactccttcttaaatagttcattagccttgtagttttttgttctagcctgttattatagaagagtcctattgatgtggtgataagctgccgtgagaggggaagcattttacaaacctgtgattagatctgaaccttttagtgaacatgtgtccctgagatgtgaccatcacaaataattcttggctttccaccttcctctaaggtaaaacgggttttgctagagtctaaccaacctcagacaaaggaaatacccaactccagcccactctagcctttcggctcaggtagtattatttccattgagggcagacctttcttaagaacagagcactctgggtatatttcaaaatacaacaccagaggtttttctcccatcttcactctgagacccctggtgggactcctgaaggtaaaagttatgaaagtgtgtgagggctcccgctaaagctgggacaagaggaattttaatttctcattatagtccacgctcagtctccagtagtgagtaagttcatttttaatgatttatgactgttgttgtctccaatagtggcttccgttgttccttgtaagctctatgtattcaaatgtgtctctagttttgtataatggttgtttgccctgtgacctaaattctctgatatatctaagaaaagttatctattttcaggtttttttttttttagcttctttcttgttgtgaggacaggaaatggatgacagctttcaagctttttaccttttggactgaaagttgaaagtcctcaatggaattattattattattattattattattattattattattattattattattttgagacagggtctcactttattaccccagctggagagcagtggatgtgatcttggcccactgcagcctttgcctcctgggcttaagtgattctccagcctcagcctcctgaatagctgggactacagacatgcaccaccacgcccagctaatttttgtaatttttaattttcttttcttttggtaaagatggagtttcaccatgttttccagactggtctcgaactcctgggttcaagcaattcatccacctcagcctcccacagtgctgggattacaggcataagccactgtgcccagcctggaattcttttcttaatttcattttcagattgttcattgctagtgtatagaaatatgactgatttttgtatataggcctcatatcgtgcaatcatactgaacttttaaattcgttccagtagggtatgtgtgggtgtgcatttgtgtgttttggtatttttgcaagataatatcatcttcaaatagagatggttttactttttcattttcaatcttgtcttttatttctttcttaactgattgtcctagctagaacctatactgcaatgttgaatataagaagcaagaacaggtatgttgtctgttttttattttagggggaaagcgctctatcttgcatcattcattataatggtgttggtttttcataaacgctccttatgagtgtgtgaaagttcttttttattcctagttttctgacagtctttcttatgaaagaatgtgagactttttgccaaatgctttttctactatcatggagattataagttatttatatttgtcctttagtctattgatatgatgtattacatcgattaatttttggatattaagacaaccataaatttatacaataagtaaaaaatgtttatgttgtacaatcctagttatatgttgctagatttggtttcttactattttgttgagttgtattttgtatgtctatgttcagaaggaatattggttcgtagctttgtgttcatgtttgttttgcttttccttgtgaggtctttcttgcttggttatgtatcagaataacactggtctcactttgagtcaataagtgattcttcctcttcctttattttttggaagatttacaaaggactggtattaattcatctttaaacatttggtagattttatcagtgatgtcatctgggcttggtcttttattgtaggaggttttaaaattactaaactgattttatttatttgctatatatattcagatattttatttcttcttaagtcagattttatagtttgtacccttttaagaatttgtccatttcattaagattatttaatttgctaacaacagttgttcatagcattccttattcttcttattttcctctaagtttggaagtgatatctcctctttcatttctggctagcaatttgaacttctgtattcatggttagtctagttaaaaatttttcaatttggtcgatctttttaatgagctaaagttttgttttgttgagtttctctatatttttagttctctactattttttccaatctaatctttattattttcttttcttctgcttatttagtttgctcttatttctccactttcttaaggtatatgtttaggttttgatttgagatatttcttcttttttaatataggcatttgtgcctattaatactttactaagcacagcaatagctgaatttcataattgttggtacgttgttttttctgttaattgatctgaaatgatttcctaattccccttgtgaatttttttcctttgactcctttgttatttaacagtgtgggttttgtttgttgtttgtttgttttttacttacatatatttgtgaatttcctaaatgtcctttagttaatgatttctaaaatttcatttcattgtgttcagaaaatatactttgtatgatttcaatatttttaaatgcataaatgtttgatttatgtcctaatatgcaatctatcctggataatgttctgtgtgaactggaaaataatgtttgatgtttttaggtggagtgttttatagatgtctgtttaagtctggatagtttctagttttgttcaagtcctctatttctgtattgatcttcctcttagttgttttattcattattgaaagaaggtgatcaaaatatccaactattagggctgaattgtctatttctcccttcaattctatcattttcccacatatatttcagtctatgttgttaggtgtatatatgtttatattaataattaacgtatattactgatacattaaaaatttatcattataaatttcatccttttcctgagtaataatatttgtcttaaagtctctttcgcctgatagtatgttttgagttatttgcttagtttttgtccaggggattgcaatttacatgttaatttataacaatctaattggattagtagcaaattaatgtcaaagcttaaactcctctttgttctattattgacatacaaattcattttttacattataagtcaatcaacacagttttatccttattgcttgatacagttgtttttaaatcagataggaaaagaaaatccttacaaaacaagtatatttatattatctgttatatttacctatgtactttaactagtgcttttatttcttcttgtggatttgacttcctgtccagtattccccctttttatttaggttgtaattttttcttaacatttgaatgataaaatgaataaatatagactttttagttggtagtctttttcttttggtgctttgaatatgtcatcccattgccttctggactccatggtttctaatgaatagttagctgttcatcttattgaagactccttgtgtactgtaaattttgtgtttttttctctttgcattcagtctttgacctttgacagtttgactatgatgtatttgtgtgtgaatttctttgaatttatccaaatcagagttttttgaacttccaaaaatgtagattagaatttttcatccaatttttaaattttcagttgaaattctttaaatattttttccgctatattctctgttttctttttcttggcctctcatccatcatgcacatattagtaagcttcatagtgtcccgtacgtctctgagtttctgttcatttttctttatttgtttttctttctattctcagactggataataatcaatggatctatctttaagttcaccggttcattattctgacagttgaaatctgctgccaacaccttcttgtgaatttttatttcaataattgtactgtttttgaccaaacttcaatttagtactttttttgttgttgttaccatgtcattctgctgaatctatttagtacttttttatagttgctaatcctttattaataatctcagtttggagaaatcagtcccagactttgctttatttctttggatgtggtttcttttacttctttaaacatatttataataggtcattcaatgtctttttctagtaagtccatcatctagtccttctcagaaacaattttagttgactatttttccacatatgtttaggccatactttcttgtctcattgagtaccagtttttttgttttttgtttttttttgagatggagtctcgctctgtcacccaggctggagtgcagtggcgccatctcggctcactgtaagctctgcctcctgggttcacgccattctcctgcctcagcctcccacatagctgggactacaggcacccaccaccatgcctggctaattttttctatttttagtagagatggggtttcaccatgttagccaggatggtctcgatctcctgacctcatgatccacctgccttggccacccaaagttctgggattacaagtgtgagccaccacgcccgaccattgactaccaatttttaactgcacattttaaataaaataatatgccaacattgtaaatcaaatacccctccccttttgcttttgttatttctacttcttggttttgtttttgttgttgtttgcttttagtttctttcatggactaattttgtatagtttgtgtttttggtcatgagtaactactaaagtatttactgggatggtttggtgtcagctaatggttggaatattgatttccttcaatcacttcaatcaatatgtttccgaccatctgccaatgggctctctacttgtgctggggatgacttcaatctttggctgtttacaactctgttttaaccttaacttttatttatggaaaggctcaacaacagtcagtgtgagatgttatgacattttcaagtcttttctaggtatgcacacagacttttaatgcaactttctagatccccaggaatatgttagaccttttcaaagttccttattttcctgatatttaagggttttggtggcttgcctcttatttgcttcaactggtatcaccacatcagaaagctatgaaaaacaattgcctccaattgttttcaataaatgccctatgaatagggcttctcaatgcttgaattctgagtcagggcaagtaaatactagcctcataaaaggagcttttccatgaggaaaagccaaagagatcaactagtaacagttctataatgatgaaaatgcttgatctccaaactccttcttccctgtcctatgtatgctgggttgctgattttcacagctgttactgttttgagtttgctaatttttaagtctatggaactaaggtgagaggaatgagaatgcagttagtgaaaatgccataaagctcactgttcttgccaagatgtattcacttattttgaataaattgttctagcatttgtataagcctttacaaatgtcaagagtaataacaaagtagattttgacaattatttgtcagtgttctaatttcttttagggaggagtaggttttcaaatgtccctattccactattcggaaagtgctttcaagtctacaactgccttgataccagaaatcaagttagatttataaaaggggttaatttttggcctactcacaaatatctttgctaaattttctggaagcaatcatcaaaacattaaaaaaagataatgtcttttcttctctgtgataatcctattagcatactatgtttatcttcttgctcaaaatctgcatacatgtggagaatattcttaaaaaaatggacaatacatattattctgcaacttgagtgattttacatagaaagaaatgggcattcctccatggatataaatttacttacatatattgatctgcttatcaaacttattctttaatcactctcataattgcacaggatggatctgttatgtctccttcagaccagatattcaggtttatagcatattttttaaacacaaaaaacaaaacagcaaatagatttacatactgctgccttcattcctatagagggaggtccattagagaaaacttaatgaatcaaatgtttgtgccaatttatttaataaaaagcttctgaatttttactgttatgcatatgtgcagatattacactgaaaaaattgtatctgttcctaaaataagttatcaaatcgtgtatttgtacccattaatcaacttctcctcattctttcctcctctcaaacagtctaccttctgttttcatgagatccatttttttcagctctcacatgtgagtgagaacatgtgatatttgtctttctgtgcttggcttatttttcttaccacagtgaccttcagttccatccatgttgctgcaaatgacaaaatttcagtatttttaatggcagcatagtattccattgcatatatacaccacattttttttctgtatttcttctaaaaaaaaaaaaaaaaaaacaggatacatgtgcagatcgtgcaggtttgttacataggtatacctgtgccatggtggtttgctgcacctactggcccgtcctctaagttccctcctgtcatcccacaccctccaataggccttgttgtgtgttgttcccttctctgtgtccatgtgttctcaaggttcaactctcacttatgaatgagaatatgctgtgtttggttttctgttcctgtgttagttgctgaggatgatgatggcttctagtgtcatccgagtccctgcaaagacataatctcattcctttttatggcagtatagtgttgcatggtgtatatgtacaacatttccttatccagtctatcattgatgggcttttggttggttccatgtctttgctattgtaaatagtgcaacaataaacatatgtcttcatgtgtctgtatagtagaatgatttatattcctttggatatatacccagtaatgggattgctgggtcaaatggtatttctggttctagatcgttgaggaatcaccatactgtattccacgatggttgaaataatttacatttccacaaacagtgtaaaagcgttcctatttcctcacagccttaccagcatctatggtttcctgacattttaataatcgccatttttgactggtgtgagatggtatctcattgtggttttgatttgcatttccctgatgatcagtgatattgagctttttttcatatgttcgatggccacgtagatgtcttcttttgagaagtgtctgttcatatcctttccccatgttttgatggggttgtttgtttttttcttgtaaatatgtttaagttccttgtaaattctggatattagacctttctcagatgggtagattgcaaaagtgttctcccattctgtagattgcctgttcactctgatgataatttcttttgctgtgcagaagctttttagttaattagatcccatttgtcaattttggctcttgttgcaattgcttttggcatttttgtcatgtcaatgtcctgaatggcattgccaggttttcttctagggtttttaaggttttaggttttacatttaagtatttaatccatcttcaattaatttttgtgtaaggtgtgaggaagaggtccagtttcagttttctgcatatggctagcaagttttcccagcaccatttactgaataggagatcctttccccattgctggtttttgtcaaatttgttgaagatcagatggttgtagatgtgtgatgttatttctgaggtctctgttctacttcataggtctatatgtctgttttggtaccagtaccttgctgttttggttgctgtagtcttgtagtatagtttgaagtcagatagcatgatgcctccaggtttgttctttttgcttaggattgtcttggctatacagggtcttctttgattccatatgaaatttaacctagttttttctaattctgtgaagaatgtcaatggtagtttgatgggaataacattgaatctataaattgctttggggagtttggccattttcacggtattgattcttcctatccatgaggatggaatgttttttccatttgtttgtgtcctctcatttccttgagcagtgctttgtagtcctccttgaggaggtccttcacatcccatgttagctgtattgctatatattttattctctttttagagattgtgaatgggaattcattcatgatttggctttctgcttgcctattgttggggtagaggaatgcttgtgatttttgcacattgattttgtatcctgagactttgctgaagttgcttatcagttcaagaagtttttgagctgagatgatggggtttcctaaatacaaaatcatgttgtccgcaaacagggacaacttgacttcctctgttcctattcgaatactctttatttctttctcttgcctgatttccctggccagaacttccaatactatgttgaataggagtggtgagactgggcatccttgtcttgcaccagtttttgaagggtacttccagcttttgctcattcaatatgatattggctgtgggcttgtcataaatagcttttattattttgagatatgttccatcaatacctggtttattgagagtttttaatatgcagggatgttgaattttatcagaggctttttctgcatctattgaaataatcatggtttttgtcattggttctgtttatgtgatggattgtgtttattgatttgtgtatgttgaaccagctttgtgtcccagaggtgaagctgacttgatcgtggtggataagttgtttgatgttctgctggtttccgtttcccatattttattgagaatttttgcactgatgttcatcagggatattggcctgaagttttctttttttgttatgtgtcttcccggttttggtatcaggatgatgctggcttcataaaatgagttagggaggagtctctccttttcaattgtttttaaaagtttcagaagtaatggtaccagctcctctttgtatttatggtagaattcacctgtgaatctgtctggtcctaggctttttttcgttggtaggctattcattactgcctctgtttcagagcttgttattggtttattcaggaatttgacttcttcctggtttaatcttggtagggtgtatgcatccaggaatttatccatttcttctagattttctagtttatttgcatagaggtgtttacagcattctctgatggtagcctgtatttctgtggggtcagtggtggtatcccctttatcattttttattgtgtctgtctgatgcttctctcttcttcttctttattagtctagctggcagtccatccattttgttaagttttttcagaaaacctgctcctggactcattgattttttggagggctttttgtgtctttatctccttcagttcttctctgatcttagttattccttgtcttctgctggcttttggattagtttgctcttgcctctctagatttttgaattctgatgttaagttgtcgatatgagatcttcctagctttctaatatgggcatttactgctatatatttccctcttaacactgctttaactgtgtcccagagattctggtatgttgtctctttgttctcattggtttcaaagaacttcttgatttctgccttaatttcattatttacccaggagtcattcaggagcaggatattcaatttccatgaaattgtgtggttttgagtgagtttcttttcttttcttttttttttttttttttttgagatggagtctcactctgtcacccagactggagtgcagtggcacaattggttttgagtgagtttcttaatcctgagttctaatttgattgcactgtggtctgagagacttatgatttccattcttttgcatttgctgaggagtgttttacttccaattatgtggtcgattttagaataagtgccatgtggcactgagaagaatatatattctgttgatttggggtagagagttctgtagacatctactaggtccacttgatccagagctgagttcaagtcatgaatatccttgttaattttctgtctcattgatccatctaatactgacattggggtgttaaagtctcccactagtattgtgtgggagtctaggtctctttgtaggtgtctaagaacttgttttatgaatctgggtgctcctgtattgggtacatacatatttagaacagttagctcttctcattgaattattccctataccatgacataatgcccttctctgtcttttttatctttgttggctgaaagtgttttgtcagaggctaggattgcaactcctgcttttttttgctttccatttgcttggtaaattttcctctatccctttattttgagcctgtgtgtgcctttgcatgtaaggtgggtcttctgaaaacagtacaccaatgggtcttgactccttatccaatttgctggtctgtgtcttttaagttttggcatttagcccatttatatttaaggttagtactgttatgtgtgaatttgatcctgtcatcatgctgctatttggttattttgcacactagtagatgcagtttctccataatgtcattggtttttacattttggtgtgtttttgcagtggctggtaccagtttttcctttctgtatttagtgcttctttcaggaacccctgcagggcagtcctggtggtaacaaaatccctcaggatttgcttgtctggaaaggattttatttctccttcgcttatgaagcttagttttgctggatatgaaattctgggttgaaaattattttctttaagagtgctaaatattggcccccaatctcttctggcttatagagtttctgctgagaggttcactgttagtctgatgggcttccctttgtagatgatctggcctttccctctggctgcccttaacagtttttccttcattttaaccttggagaatctgacgattatgtgtcttggggttgatcttctcatagagtatcttagtggtgttctctgtatttcctgaattttcatgttggcctgtctttctaggttggggaagttctcttgaataatatcccaaagtgtgttttccagtttgtttccattctcccttctccttctggtactccaatcaatcataggtttggtcttttcacatagtcccatatttcttggaggcttttttcattcctttccattcttttttctctattcttgtctgcatgtcttatttcagtaaggtggtcttcaaactcttatatcctttcttctgcttggtcgatttggctgttgatacttatgtatgcttcatgaagttcttgtgctgtgtttttcggcttcatcaggtcatttatgttcctctctaaacaggttattctagttagcaattcctctaaccttttatgaagtttcttagcttctttgcattgtgttagaacatgctgctttagctcatcatagttttttactacccatcttctaaagcctacttctgtcaattcatccatctgattctctgttcacttctgtgcccttgatggagagatgttgcgatcatttggaggagagacactttggccttttgggtttttggcatttatacattgattctttctcatcttcgtgaatttgtctacttttggtctttgaggttgctgatccttggatggggtttttgtgggggctttttgttgttgttgttgatgatgctattgttgttgctttcttctggtttgttgttctttcagtagtcaggtccctcttctatagggctgctgcagtttgctgggggctcacttcaggctctattcagctgatttgctcccgtgcctggagacgtcactgaaggagcctggtgaacagcaaagatgggtaccttttccttcctctgggacctctgacctcgaggggcaccaacctgatgccagtaggatcactcctgaatagggtgtccgacaaaccctgttggagggtctcacccagttgggtaggatggggaacaggacccattttacaaaacactttgtcctttggtggagagagtgtgcttcactggggggaaacccactcttctgggctgcccagattcctcagaactaccaggaggtgaggctaagtctgctgctttgcagagactgtggccattcctccctttaggggctcaggcccagggagatccaaaacctgtccctgagcctctggctggagttattggaggtcctgcaaggaagcccagcccactgaggaaggatgggtcagggttaggcctgaagaggccctctggccacagactgccacagccagtgtgttgggctgtggggacaagtcttgggaccaaaccttccagcctttctggctccagcaggtgaaaagtgcagcctggagctgtagaaatgggtgctgcccttcccccacccagggagcttagtgtgttaggcagttgcaagtcccagtgctggctgccccttccccaaggagcttaaaccacttagacaacaggcagctgcagttggtgctggtcacccctcaccccaggaagtcattaggattaagcagattccagctgagaggctgtaacaatctgcgctttctggggttgggatgctaggcccttggtggcatgggttcatgagtgggatcttcccttccatgggttgcacagttccgtgaaaaaagcagattgcccggctgagtagcacgctcactcaccacctcccttggctggggggagggggttcttctttcccatgtggctttcaggtgggccaccacaccacactgctcttccttctcttcatgagtaggaaatagactagccttctagacaattttgatgacagaacttggatacctttgttgctggtgatggattcacatgcttattatgtttttttttttttcatatgagtctctgaatgccagtccttctagtcggccaccttggtcctgaccctaaattattactttctgtacattaacttctactatacctttgtgtttatttatgaaatgcttacttgtttcttagggcttatttgtccaattctaggtcaatatactattatttgtaatgttttaaagtcaagaaagagtgtttctcatctttttctccagcatttttttagttcttagatatctgttctaccatatcacaccaaagtcatttgctgggtttttgtaaaatcaagattttgtttgaaattgtattaaatgcatatattagttgtgaaaataattcatttataaatatatgatatctcctgcatgagcacaggatattctctgtttgtttgtggttcttttatgtaattttcaataaattttatactttaaaacaaattatgaccttcaactattttattaaatgtgtctttctttcttcttttgagagggggacaatgatgataagcaaaaattgcccccatatgtataacttacatgttttattaaattaccttaggattttttaactctttagtaatttctagggtttttcaaagtgtatcatcataatatctgtagagtttacttttatgtttcttatggaaaattgatatttattacttaatttacatatcctattacattagttaaatcattaaagcaattctgagtaattgtgaatgggaagtcctgatttctattttactttttaaaattaattaattaattagttatatatttaatgttgtgttcttggaataaaattaatttggtcatggtgttttattcttgtaatacactactggattcactttgctagtatttcactttcaattttatatccatgtataaaagtagtatgtatatcatgtttttatggtattatgtttattagctttagctattgataggttttattgttgttactttagctaataatatgttttgttgttgctttgttttgttttaggtttcataaaataagttttagaacattgtacgttattcagctgtttaatattattgatgtaaaataggtataatctcttatattaaggtaagtagagcatatctggaaagccatgtgggcattaggacattttctaatggcagattatgtttcccatcttttctatgatcactggactctacaggttctctatattttggtatttaatttgagaacatgattttctgttgaaaatcatcctttctctagatttgtattattttcattaccaaatttgcccatattttttgaaatttttgtaaatatctcctctgtgtacatacttacatctcatttattatatataatgtacatttttacttctctcatttaaaaaaaaaatcctttctactagtttgcctgtttgattttttttttttttgaacagccttcttttagttttatttatatgtatgctatacttttgggctttttgcttcattaatgatagttttttacttctttaattctccatcctgttattttggttgattttgatgtttcctgtgtctcggaggctttgcagtgaaacttgattgttaatgtaattgagattcagaagctatgagatgtggctaatatcttatctgtaacattgcttaaacatgactttgtggaactcttgtggagatggtaactttttcctgaatgcttgaatcagctttgaactatgcaatcaatttacctgtaatccaggaggctgcaagaagataggtcccatggtaaatgattgcaattcttttatctggattcataaaaatcatctgctaaacacttaagacattatattatattagcttacattaagtactctgctttttcatattgcctcacactaattattatgctttggttgcaaatgtattttaaatcttaagagcaatccaaatggcagttttattgtttactgtggtccttgctgactatagtaaattgtttgctgactcagcttaaatttagaaaatgtgcacatattttggatttcttcccagaaatgaatgtggctataggtaatataaatacataacaaatccccttggatttagaaatttgtggaatttcctttggcattgcagattagcagttaatccttctttcttagctaggtttaaatattggagcaatttgtagactcttagaagtaatagttttatctggacactgattattttgctggaaagcaagaaatcaggtccacacgaagaataccaaggagagaaacatatgttaactttaaaaaacaaacaaaaaatgtcaatttgtatattggtattcaagtgggagcgataaaccattaatacacatataagggatttcggagaaaatgttttggtagcagatttctgtccttggcatctgtgatggagggaggatgatttgcgagtcaactgtactgcggtagaaacaacattgggtttcatgttagtacatgtagtttcaaatccggggtctgctattcactgtttccatgaatttgatagtcactttcattcggaaacttcattttcacatgcataaaaagttgtataaatatcagtactttgtacaagaggccaattcaatgactgtcctggttttgcagggaaaatgaaccggcccgcacagcgatgagagagtgctgtagtaacatgggcattggaagaggatccccgcaaatctttaagaagagggacaaaattggttcctagatggggaaaaccaagggtggtgtattaataacagatgaaaataaggaaaagaattaaattactttgaaaattctgagggaaagggaatcttcaccacatcatcagaatcacacacagcctgctgtggtgaccaatcaccagtcagatcaccaggaggctctcttactaaacgttgaggatatttgcaagttttagtccataatgcctggcatccgagtagagactcttgtcccttacaattttactttctttccagagcttgataatttagttctgatacctattattgtgggattgctgttgtactgtaggcaaatgactcacttcctcaagttcgaatttcttcatttttacagagatggtgatgatgccttgttgttagagtgagaatggtaggatataatgtgtgtttacattcactgacctggtcccttgcctagcattaattaatgattgatgcatgtgaattacctttccttctgactacttgatatgtttcattaggcattcattcaattaatagtcattgattctgactctatgctagagacactactcagtgttacacgtgaaacaagattcctagtcccagcataatggagcttgcgaatgaaagagggagatagatattaaatcagtcatgccagtaaacataattataaattgtaaggtggaatttgaaggactcatagaaagttctttggcctggttaaagacgcattcacagagaaatggcaattaactgggatctccaatgtcagtaagagttaataaggcaaaggatgggtttagtgagaaggagatccacgtggaagcataacatgggcaaagtactagcttcaagaaggcttatggaacatttgagcaaataaggaaacagcagggtggctggagttcagagaggaattgggagatggtgcagcacagtctccatgcccttctgcttctgctttacttttaaggctcagtgttacctatggaaagaaaaatagtcagagtctacacatttatcaaattcatcagccagaaatcttatcagaaacaaaaagtaaagccttcaggtgaggactattgagcaccaaagatcttatttctgtgtggatttttttttttttttttttttttttttttttagtgaaataagatacatcgaggaggcaggtgcatagaagtcacttggaagtgacttctaacaggcctgttatgccagctggtttttggtgttgtaggctgaacgtgaagttgatataattgggctcagtatgtgtctttccttagagggagacagccgctagaataataaatcagcagtggaactttcaatagatacttctggaatgtctttgacttttacatacctctcttggcatttagatttgaatctgattttcagagaagaaagggttatagatcacaatctgagtcttcaacagcatatttgtagaccttagaggagtaagaaagaaggggagagggagagaaaaaagccctgggacaacttctgtgatgttaggatccaggggatgcacttggtttttttctccattgtgatatcccacttgacacatcacgattacaaatgatgagtagcctaggacaaaaccaccagcttcggtaatttgagttatcactcatgtaataaatatttattggacacctgtattgttctagatggtaaaaaaaataaaaaataattatgtttctttcaagcacttcatagtccttttgggcgctagacatgtggacaattacaataatgcagattaacttttttaagaacacacagtttcatgcagtttgttaaattattttgaccaaatatctcatcaatccttttacaaccatttttttcatatgggacaaccaagacttcaagaactctagtaatttggcaagtacccatagtttctaagtgacacagctaggattaaatccagtttcctcttctgtacagatcatcctcctaatcactgttatatattattccaacaaaatgtgtcaatcaaagtatatgcaaaatgccaagggagcatctaggagggattatgtgattctgactgaaataactgaggaaagttttaaagaagaggcaatatctgtgctctagctcaatgctcttgatctgggccagttgtcttcaaaccctggaaactcactatgatgtgataaacacagagttcctccatagtgctttcattatgaagaaatgtaagaggtgaactggtcacctatggggataatagggaacacagccgttatcataaatactgggaaataaaaggaaagcaataatttgcacttttctatatcaaagtatcccagctaataaatgaaagaagaaatgataagactatcaacatttggcagtccttctccagcaataaattaacatgttcattctcttaaaaaaaatttgttgtttgtttgtttttgtttttgagatggagccttgctctatcgcccaggctggagtgcagtggcacaatatcagctcactgtaacctccgccttttgggttcaagttattctcctttctcagcctcctgagtagcagggattacaggttcgtgccaccacgtccagctaatttttgtatttttagtagagacggggtttcaccatgttgaccaggctggtcttgaactcctgaccttaggtgatccacccaccttggcctcccaaagtgctgggatgacaggcacaagcaaccacccccagcccaaaaaattattctaatgtgactaaagaaaagaagaagttgggataattcatgagctgcattctatacacagaatgagacaaacaattgataaataaataatatataatttaacttgtgactagtgctgcaatgaagatgcactgatagaaaatactaaggtggaggggggaaaatgaggggagggccttcttgattagagctagacaggaccaatgaaaaggcattagacatgtagagctactagaagtttccaaagcagagggaaagacaggtgtgaaagctccaaggcaaattcaggacataggaacagaaaagttttcattgaaactatattatgagaagcccataaaaaacaattggaagattgcctctattttcaggtatcttggctcattttcccttccaaatgtttacaataaagagtgctacaggtcaaatccttgactgatgttattatcagattctttgtaaaattacttaatacagaaccaacaaagatggatttgcataagcagtgatctgaatgcacgtaacatgtgaaagaataaatgctataacaggctgatcaaatatttaaggaaaataaggtttaatttagtttcaaaagccatgctacagagacagttgagatgctaattaatatcctctgtctaactccagcacacaaagcatttggaaggtctaaggttcttcttttcttaagcaatttcttcatagaggctgtccccatgccagtttttttttttttgtaccctataacttctcccagaatgacatagttaaatcccattatttgagctgccttggcagatgactcccaaactgtatgtatcccttctagatacacaccagggtggtcagcccaagtacccacaaggacataaacatttgaaggacacagtagaaaattagagtattgtggatgtcattcctcacctaaaggccttggcaattatctatttaacggatctgttttttcctgtgctggacaaataggacatagctttaagttttccttaacagcaggatgttagcatgtcacttctatcctaggttcatctagagaaggatgtaataagcatgccttcttaggggctctctgtgtctaaaatgaaattttctgattaaatgcctttctcccactgtttcccttagcttgctggttggtgtagttatccaagtactttctcccgctaaaaacttgggaaataatttggattttcctctcctctccacctgtcataccactcaaacagcaagacttactgattctataccctaaacatgtgcctgggagccaggtccttttctcctctctgttgtattccagtaaaatcactcccaaacttgtataactctgtttcactgatttgggtctttctatttcattctccagaaggccaccagcctgaatttattaaaagtctcatttcattacactgggtaaaggcttctactgagtgcagaaccagtttattcttagctttacattcaggctactttactatctggcctcaacatacctaactctaatgtgcttctttggccatcaacactcagatacttaaatggggattaatatcctttctcaaattatctgcattcctaagaccacaccctcacttgtgataccaagtgatcactatcagaggctgccattttccccaactacctcctacttatttgttcatgacccagcttaatgtcagaatatccaaggaaactcccttcacatttcaggctgataaggtcacttccctgtgctgtgaatgttctttatctgctttggcatctttctcacaggatcatgcactttgttccaaaatggaagaaactgtggactttaaactcacgcagtattggcacaaagtaggtgtttaataattatgtaaaggaatataaatcattctattataaagatacatgcacagatatgttcattgcagcactgttcacaatagcaaagacatgggatcaacccaaatgctcatcaatgatagactggataaagaaaatgtggtacatatacaccatggaatactacacagccataaaaaggaatgagatcatgtcctttacaaggagagggatagagctggaagccattatcctcagcaaactaatgcaaaaacagaaaaacaaacaccacatgttctcacttataagtgggagctgaacgatgcgaacacatggacacattggggagaacaacacagactggatcctgtcacggggagggagtacggagaggtaaagaaccaggaaaaatagccaatggatgcttggcttaattcctgggtgatgggctgatctgtgcagtaaaccaccatggtacacatttatctatgttacaaacctgcacatcctgcgcaagtactctggaacttaaacgttgaagaaaaaaaattcaaaactgcttcccgcaatgtcccctgcccccatgcctgaaaaccttgtaagattttggttctgaattggaaatcgtatttctttaagaaggcagatttcttattcctcaggaatctatatacctgctcccagaaacagtagatggtatgtcattagacagaacctcccctgagggcatccctagaatgccagaaaaatggatcaagaggagacagtaattaggagttttctaataggagaagaagaaagacaggaatctgaaacaaaacttgtttaccagggctgttgttgccactgcaaactgtgcaagaaaacaacaatgtctcaaatgctactctctaggaatggagacagtgggcagaaatggatgcttctcccaaattatggtaaatgcagagtgccaaaacgagcttctttctttctgagaatgttcttctatttgaatttaagcttataggccacggagtgcaggcaaccagcagtcggggaggccaggcacagtggcccatgcctgtagttccagcactttgggagctgaggcaggaggatctcttgagtccaggagtttcagaccagcctggacaacatagtgaggccccatccctaaaaaaattaataaataagaaaaaaaattatcattgaaagaatgagttaatgaattaatcagtgcatatatgttctccaaaatttcactcacactttaaatgttgcttttctaagtcagtatgcttcctgattttacatgtatttattcttcctacctactccttccacccccagatgcacacacacttacctatggctttcagccatttcatattagggaatttgcctcattgttgtattctatgtaacaactagcagagttgcattcctctcttaagtagtttttggtttgaaaattgcaaaagtattactgaactttggaggtgttcagaaactgtatgtcggaagagcttgaggctcctctgcatgtggtattctagtggatggggaatttttcaatgaatatacaaaatctccaaggccttctgctgtgtaaaatataaatagctgctcttgatgttcacactcattcctacacaccttcaactggtgcaagacttatcctttagagacctcctttcactagatacagttccgttacgccttttaaatgttgagtgatgacaaaataggacttattggaggggtaaatgagggatggtgacgagaacattgattttagtcccaaatagaggaagcattcaaaaattatctagtttccccaagaaatgtgcatccctaagaaatacagtgctgcggataatttccagtcagtgtctggaggatatcttcagccattagaatcataatctactattagaaacaggtattcaattttactagggaaatgtataatgtgctccacttgtgatttttctggagaggaatgtcaaatttgtattttgcctatggcagcccccacccgctttacagcatctagaaaaattgggatttaacaaggaagaaaacactagggaaaagaaatcatgtttgcactgcttaagatatggatttaaaaatatgtattttaaacaattttacttatgaagttctctgcatacatttacagagtattttctatgaaccaggaaccgagcatgtggtggatagttaggcatggtctctgcttttcaagggctcatatcttattaatatacttttgtggatgtaacagatttaatttttaatgaacataaacatagggatatcaaatttgtgttcaaaacatctaaatctcaattctctcccacaaatggctgcttctttccccagctcccctgtattagaatgctctcacctccatatcaccaaggagatttctttctggatcttgttattgataatgattttataaaaagtttttgttcaacttttattgcacttaattactgatttggtgaattcgtatacatatatattcatgtttatatattcatgcatacataattgtctataattcagcaattatgtgtatatatatatttatttatttgtataacattgactatcccatttgtaccctcaaagtaactgaaaactctattataaactccagtgcctgctctgaaagttaactgtcaagtcttagctctgcaatttctcaagagtaacataactccttctctcattcattgcatattatcttttacactgaatgaataggggaaatagcaagaaaaggagaagcactggaatgaatgcagcagccatcaggccctttattctgttcctcaagcaaagactctttctgcgagcctagggcaggtccgaaagagatggagctatctgaaccacgtggggccatttggaacaaggcttccagatgatgcagtgagctaaggtgaggcagcagtcagcttccctggtagtagaggaagttttctcagaagagatgcaagttaaacaggggtccaacaaaggaagaatgtctagtggacattttgcaaaacataaagtcagctgacagatatctggaagagcctgtgagatcttcagaagaaaggccaggttttttgttatccttgcactcatgcactggcatgaggcccagcctgaatgaaagatagaactcatttttcaagatgaaatcatctttgcatttgccttagcttgcggctggtctggcttctgagattgctgtaggtactgaggaagaaaaggaaagaattcataatcacaatcaataacagagaacgaataacttgaagtctatgatgagtcaatctgtgtatgcattcatgcattcttgcatttgtctctactaagatgaacttaaatgcccccaagagacacattcccagggactcacatcttcagcacatcaggacctcctcacatggggccacatcaagcatatgtgtggtcgcaggctgtcattccctactcaacgtctttcagggtagaaacagctccacttactccaatcatatacgtttttttgagcaacctgtctgtatcaagggcagtgtaaagagtgaagatcaaaacaataactcattcagggctgtaagaactcacagtctgatgggagagagatagcagaagactatgggtgacatgatacactcttctcctccataacaagacactagccatgggtttggaaagaagctctataaaagtggtttctgtggattttgtttgtttgtttttaagcagtatttctgcaagaggatgcatgacagagtggagtggtctgtagaaaaataagtttgagatatgcttttacttttatacatcaagttcaacatttccctctctggtaaatttttataaaatggattagcacactacaagttctcataaatcctgcagtgaagaaacctacttgttttgtttaagttaggatttaattacccccatgggcctctctttggggaatgctgctttatatcttccagacggcttccctgagttattgtgggtgcctataggcctggtgagcacagataagacctgcaatagaacccataccatcagagcacttgaggatggataaacctttggtctcattctggctaatcttctagcaagtcaagcagttaaaaaccctgaagactggccttagcagctggtcactcagcttctccttggtgggaaaactcatgctttatataataaaccaaaatctacaacttttgactgctctttttgatgttgtgttctgaagaaatctgcctacaccctcttctggagcagatttgaaagcatccctcaaatctcttgttgccaaagcttctcagaaatttgactcttcaaacccaaagccactctctagtcaaactcttctcatcctctgctcaggtggatttttaaaaaaggcactttaaatacgtttattgattgcataattagtgtggatttaacttggtcaacacaaaatcatttatcaagttcaacactgacatttttattttggtaaatcttattgaatccaacaaaaatttccatgtaatggacagcctaataaaatactcaacagttgccctgccacaactgaaggctttgttttccatagtcattctctattagtgagtgtttctctctgtttatatgttttccctagtgtttaactcaacatcatttaatcactaaattggtatcacaggtatttttctaaattaaaagccttatcatctacgttaactgcttggctactgaagagttgcttcttcctgatacaaaaaagaatagcaatataatagtaagcagttctgtccctctgtaatacctatgtgtgccagatggtggtctaggtgctgtaaacaattcaacttatacacacctcaagacaactctagaggaagatgaaattatttttcccattttataattagaaactgaaatgcagggaacttaaataactcatctagatgactcaaattagcatatctagttggagcttgaatttgaacccaagcagtcttccttcagagtccacactcgtaaggattatattatatgacttgtctcagttgaattagtacagatttgatcctagaaggcctccagtacaattgatttggctgtcaaatatttaaagaattgaagaatcacctgtgaccatgatgaatagggagaattcatgtaggtaaatattaacattagaaaatttatctgataaatgcaagaaatttagcaaaacccaggagtgatggtgtggggagcttgggtgtttgtttcccatttcacaaaacaaagcagccaaccttacattcatctcaacaagtagtttatttaacttctcagaggaagagcagcaaatgtaaataaaatcaataacagcgactgaaaaatcttaacagggaatgtatatcagctttcctctgtgtgcctctgcttgtctattttattcaagatactgaatacatgatttctcatttgggtttctgtgctgtactaggcttcagcaatatatgcatcaaacattttgaaagtctgccccaagaggcaaaaagaccatgtgaattatacattgcctcacagagtgatgatactgtagacctacttgcatgtttgtttttgaagaatttcatccaggataaaaaaagagaaatatagttgaaagggttctataggtttgacaattcaaaataaaaaaatgttatctctatggaaagtcatagtggttaagtaggattcatatctcttctatttggaatccagcatggcctcttctattgttttgtctgccagactgtgagtgtccccagatctatgatattttgcaaaagctgagttgttatcttagctgatgtctaataaccctatttatggcacagccatgttggaaataatcattagtattcttagccttgttctataaactcataatgatgtgtttcattgtttgtggtgttagccttgggctgttagacacaattctgtttacgactatgaagtcagactgtccatccagaacatgacggattatgtattcactacatctgctgaatcagctgtgtctgtgcagtgaataccacatcctcattttcagaactccatgagctttcaggtaaaaatctataagatttaccttgtaatgtatagaacacaatttatttcattttcttccgttaaatttattccttgtggtttctgttatccatagcttgtagtttgcattacaagttgaaattcctttttgtttttgctgtggtataatatccatgtgagaatcgtctttcttcatctcagatagagaaatacaaaccacccttttactcattcactgagagactgaactagcacatttttataaaactggatcaaaatgtgcttgtgatcagctgtcatcttgtggagtttccttttttttttcttgccacaattggagttctaaaccccttataataagcacatatattagatatagtcatgtgttgattcaataacctgatttcttccctcctttggctttatcacatttgtcatataactgtcaagtctccctgagtatttgcccaacatccattgagcacatggcaaggagaaaatgtggaggattttatggagatggtttgaaaggggattcccatgccttctgtccacgtttctgtggccaacagtcagtcacatgatcccacttagatgcaaggggttctatataatgtagtccctggctcaggggatgccccagagacagttctatactctaaaagaggagtatgaatccttagtagacagttttccaactgtaccactctgtgtgatcttagaagactttctgagcctgttttcttatattttaaatgaagagaacttaactaccttacagattattattattattatatgggattatatacacaaaaaacatgtgagctgaaaaatgctacacagattcattatttttataaatgatatgagtaaaatttatttatttatcttaccttaacctagagaattagaagagcgctcaggagctaggccgtattatgagtaaattgtctttgtcttcataattgtactttttcttcagagcttcttttgtgtctttatgggatgtgccaacagagcttatgaagtcaaatcttacagataagaaggaagagtctgggaaaaccaggatgattgattaccctatctacaaaccgattttgaccatttccagggtttgttgtctgtaaccattgcattaattcaatagtaaaaattatcaaccaaagacaatacctaaactaagcatcacacaaaattgtctccacaatagctttatgtagagagaaaccaatgtgcaaggtatcaatggcacctggtgtctatactatgagaatagatatagggaagatcatgcacaggttaaaagcctgatgttttgagctaaaaaaaaaaaaaaacctagtttgaacttatctgtacattaaccagttgcatagatctcggtgagttatttaacggtcttgtcttctgtttctcatttattcaacagagagaaggttaaaagcatgttgtttttattagagttgaatttgatgatgcttctaaagggttagctgcaggggaggtccactgtggggatttagccacatgcttttcatgtgtcatttttacatgtcacagaaatgctatggatatataaagttccacagtgagatagtcataaaattggaactggaactcaggactgtctgaatccaaagctctctttcataatcatattttgttccctttctgggcatggcattgtgcctggcctatggcaattgctcagtaaatcacagcagttattgttctctttcatatctgtgcccagatcaattgccagatggaagtgggtattttgttctttagtcatctatatattagacttgagcattcctcacagtgctagtggagccacaactgccccacaccctctgagatatggctctcccagaaccttcatagacaaggcataaagttgtttgctatgtactttatctgtattaacaattttacctatttgtaatgggtttgtttttctaagaagtttgaactatgagtactcccctttctaaaactggttatgaggaagaatagaacaggatataaaagaatatcttagaaacaaagaatggagaatatatgctacactcgtgttcaaacagttaaaaaaaataaaaaaatgccaaaataacttacaaaatagatcaaggagacaaaacaaaaagcccgaagtgtaaaatataatgtattattaagctagtatttacaatgaatgaggagaagatcaattacttcatatatactgcacaaccattcagataaaaaaagttagttcttcttttcatctcaaaacactcaggaaagcacccaatttcagatggaccaaacatttaaatgtttaaagtaaaactacaaaagaagcagaaaacacaggtgatatctctttgatttcagggagggaaaaagctattcaaagcaaacaaaaagttaacaatgaaatcaactatagaggcaaattgtatatttgggaagttaactgctaaaggaaatctgtacatcaaaaagcatattaaactaaattgagaggcaaatattaacctgaggaaaacatttgcaacgtactctcattgagttttcacaatattcctgtgaggtagataataatatctccatttataatgaggaaattgacagcacagacactttaagtaatttagtaatttgcccaaggtcattcagctaatgagtggagggactggaatttgaaccctcaaaaactgaactccaagcactctttacctcacacgtggctccctcgagtaagaaaacagctctagagcccagggccatgattttgtttgtttgtcccataataagcagccatttactttcagataatatatagtcatacattatttaatgatggaatatgttcttagtaacgcatcattaaatgattgtgttgtgcaaacgtcatagtgtgtacttaagcaaacatacatggtatagcctacttgcaaacctaggctatattgtatggcctgctgttcttaggacacaatcttgttactgtactgaatactataggcaattgtgacacaatggtaagtattactgtatctgaacatgtgtaaacataggaaaggaacagtaaacatataggacaaaaggtgaaaatggtaccattgtacagggcacttacatagagcttgaaggcctggaagttgctgtaggtgagtcagtgagtgagtgatgagtgaatgtgaaggcctgtttactgtacactactatggacttcataaacactgggcacttagattacactaaacttttttttttttttttttgagacggagtctcactctgtcgcccaggctggagtgcagtggcgcgatctcggctcactgcaagctccgcctcccgggttcacgccattctcctgcctcagcctcccgagtagctgggattacaggtgcccaccaccatgcccggctaattttgtttttgtatttttagtagagatggggtttcacctcgttagccaggatggtctctatctcctgacctcttgatccgcccacttctgcctcccaaagtgctgggagtacaggcgtgagccacggcacctggctagattacactaaacttattttttaaattttatctattcaataataaattaaccttagcttactgtcacattttacatttaaacttttaaattgtttcactttttgcctcttgtaatagcacttagtttaaaacacaaacacattatacagctgcccaaaaatatctgtttttatatctttattcttaagctttttactatttaaaatatttttctgtcacttttttttttttttttttttggtagagagagggcttcactttgctgcccaggatagagtgcagtggtgtgatcatggctcactcccacctcaaactccttggcttaagtgatcctcctctggctcctgagtagataggactaaaagtatgtgctacaacaactggctaatttttttttattttttaacttattattattgttattatttggtagagaaagggtctccctgtgttgcccaggctggtatcgaactcctaagctcaagcaatcctcccttcttggcatcccaaattgctgggattacaggtgtcttttactttttaaaactttttgttagaaagtaagacaaaaacacacacactagtctaggcctactcagggtcagaatcatcaatgcatcactaggtaatagaaatttttcagctccattgtaatcttatgggaccaccatcatatatgccagttcctttttcactgaaatgttattatatggtgcatgactgtaattttgggatttctactctgattttttctaactagagtaaaagaaagttcaatatttaatacatagaaacaaaattgtgacattaaaaaaacaaataaaacaactccctagaaatatagagctgccattagaaacgctgcagcaagcctcattgtctcctgagtaccgggcctgacactcggcctgccccaggtctggccatgtctaagtgctgaggaaggaagcctttctctagagttttggtccacgccagcatccttttgcagttctcctctgtagcctgcattttcaggatgcttccatactacggaatgtattatttcctctccttggaatgcctgcgatcatcataggtatctaggaaaccatttttcaaagtgctagacagtattaggatatctttgaagtcaccctagagctacgtaatcattcctaataataaaataaaaacttccatgcatctgtgatgccactcacactagataataattttatgttcatttgccttattcctctattaagctggtctattattaagcctccaatttgtctgttagaccaatgatgcccaacctttttggcaccagggaccagttttgtggaagacaatttttttccacagacaggtggtaggggaatagggggaatacggtttcaggatgaaactgttccacctcaaatcatcaggtattagattctcataaggaacacatagcctagatccctcacatgtgcagttcacaatagggttcgcgctcctttgagaatctgatgctgttgctgatctgacaggaggtggagctcaggtggtaatgctcgcttacccacctctcacctcctgctctgtggcctggttcctaacaggccatggaccagcagcagtccatggcctggagattggggacccctgtgttagacaatctctgtgtctcctgaatccagcatagctaggaacataggaggagctgcatgatacctggtgagctgaaccaaactccacggtgaaacaacagtgctctgtgtttattctccaatgtgttcatttgagttccatatcataattcagcacacactgggagcacagaagatcccctgaccagcatcagcctgtagggacctgaatgtcagtgaaggttaccgctgccttgtggaaaaggcactgatcactggaatggaaagttcaggacaaatttggcagtgataaactcaacccctctgttctccctgggctgatttttccgctaagaaaatcttaaggagggtctagcacccactgtggggttaccatttttaaagagcttgatgcacgtcaaaaagagcatgtaatttgggtttgaaagaaaggaagacaagaaaggcacagaccgtggtgtgtgtgtttgggtgggtggggtgtgctggaagacagggcagtctgccactgggcctcaggccctgagagcctgggagagtccactgtgtttctccaggatcttccctgactcagttccagacaggctcttcacaaagactcctcagttcatcacatgattcccaacccaaccaggggacagctgtccatgcttgtgctgatggtctagctggacaaagaaaatgggtgaaccagggtatataagttccttggaggactgagagatgtagaaactcttctaagaagagtgtttccctctttggctttgtaatcttattgcattatctttattatcaatgacaaacagagcatccactctgttccagacattttcagaggtgccagggtacaaagatgaactccatcctgaggaactggtcacatctgtctatagggaattcagtctatttgtgtgccagaagagcataaagacactgacaaaaagaaaagtcattaaggggccggcttctggaagagagatgtcactggagaatgaagtagaaaaaggctggagaaactggaaccaaaggcaacagggaccaagacctcgctctgtctctcaagaaggacacaaagaacagtgattatagtgtacaccttggagtaagatagacctgggtttaagtccctactgtgatatttctaaattccaaagcctacacccaacctcatgcagcatcagttttctaatctgaaaaagggaagaaagaatatgtatcatcgttgggttaaaagagttgaatactcacataaagcatgctcacatagtgtactcacaggctcacctgaggtagcattccccatgcctcagtgacttgtgggtagaaatgaaggcttactaatattcatgctcagaattttcagctgcattgcctccactggaggaaacagaaggtcatcagcctcctgcattgagtctctccattcactggcagtttctcttagattgatacagtctgcttgccacactgtagccagagcagtttgctccatcaccatggcagggctgctaccaaataggccttcttgtccatactcctgtaccatacctttaggtcactggggccactgtagaatcaaagcactttgtttagttcttggcatgctctattacctgcatactaccgtgagccacatcttccatcaccctgtttggttctcaccattctgccatgtctgtgagcctttaccttgcattgctgtgcattgctgtaggctgagggccctgcacctacttcaggtttctctacagagttgcactggtttctaattgttgctgttactaccaccattgttagtgttatcagcagacttttttgactgatcggattggattgtaagcaagtgcaagtatatgtattcattcattcaaaaaccacccactgagcaactattgcatgttaaatattatttcagacaaggaggatgcaatagtgagcacagctgacccaatccctgacctcattcagaagtttatagtctagaaacatatcttctctcccatctttctgccggagaaaagaaaaacagtgctgctctgtcctgtgttgaattatttctcaacatctctgcatcatcctttaaatgtagtctgtgctcctcccgtctgagccctccaacagcatccacttgatcccagagaaaggaagtaatattcacctaaaaataacaagcatatcaacctcagcttctgccagccatgattccctgggaataccatttctttcaggagctggaacacagaaaatatcagcagaagttaccccaaattgttgagcccccttggttccagtcagaatatttttcaagaaaaaagataattctacttcatttgctcattgctctggttgtcaggagtatgatacggaatacaaaagacaaagaatcagtttggaaactgctagaggaattgagtaatggcaaggtcatgattctctttattttgatagctggtggggaatttgcttcttgcctctccctaactggagtgaggattgcatctttctccgctttttgctgcctacacaatctcactttctttacaagcccgttccattacattctctttctccatccctttgccatttttcttatgtgtaaaacaggaataatagccatactgacatcaagatatgttttgaggactgagttggtacattgggttatggaaacatgtccacagtagagcgcttaagggttgtgcggctaaggctttggagtttggcttcctggcttcgttatttgctttgacttcccttaggcaaattttaacctctctttgtaaaataaagaaactgatagctacttaaaagttgtagttatgacttacaaatcatgtctacaaagcatgtagcacagtgtcccacatagtaagtagtgaatataactagctactaaatttatgatgaatattattatatctttcttttcctccctttacctcaagagtgctacttaatttgctctgttttgatctctgtctttcatgcaactctctattcatttcggtgcaggaaaaaactgagatgagaatgacataaaatctggagacagtgcaggctttctggcttctcttcttagctacacgtgcagcagggttatggcagtgcagggaatcagcagatagggtctctggctgagcaagaagttccaagggagcacagatatgacactgcagggggcctgttctcaggggtctgcagtccctgtgtgaccctgctagagccttgcaccagcagctgcagtgtgaggagcacctccccaagaagagccctctatcctcccacatgcctgctctttgagcaatagtcatctgttcaggacgtatgcattatttccttctccatttgtcatatggattgcctaatatttatctgtgctgtttttcacattactctgaaaggtttctaagttatacttctttatgtgctcttggattgctggcttacaccaccactgccaccaccatcaacaataccacgactgctaccaccgtcaacaatatcagcactaccgccaccatcaacaatactactgctgccaccaccatcaaaatcatcaccattaccaccatgaacaccctcacaaataccattatgatcagtatcaccaccactatcatcaacaccatcaccaccacaatcaccaccattaacaccattaccaccatcaacaccaccaccaccaccaccactgccaccaccaccatcgacaccatcacaaataccattgtgacaactatcatcattgctatcatcaacaccatcaccaccaccaccaccatcaccaccaccaccattaacaccatcaccaccagcacccaccattaccaccacttccactgtgtgtcaagcttcctctcctctgggacattttttctgtttctggctcagacttgcacatccctcctatttgctttttctgtttccacattcttatcattgcacatgtcacacccactaactgattttggattgaatcctataaaatacagctcatgtagatttatccatttgaaattgcttaaatttgaccgtttttgactgtttgcttatttcacatattcaagctggtatttatctacgcaccccattaaactgttagttacgtgagaaaacaaggagaacttttactctattttggcaacacctggcacagtgcttgatacttgatacaggtgcattgaataactgaatgaggcatatggcataagctttatagactctgaagcagtattcaaatgtaagagactgctgcagtaaaacaattgagcatataaaaatattttcatattaggccgggtgcagtggctcacacctgtaatcccagcattttgggaggctgaggtgggtggatcacctgaggtctggagttcgagaccagcctggccaacatggagaaaccccgtctctactaaaaatacaaaaattagccagacatggtggcacatgcctgtaatcccagctactcgggaggctgaggcaggacaatcgtttgaacccgggaggcggaggtggcggtgagctgagatcacaccattgcattccagcctggacaacaagagtgaaactccatctcaaaataaataaataaataaataaatctatctatctatctatcttcatattaaaaatgtgacctgtccttagaggttgatttggaaatgaagaaaagaaaagtgtgagactttgaatcatagaagttcaaatatattccagagttctcagggtaagtcaggggcagccttgggggatgagtaggtagggtcccattttcttcttctgtctctgctgctctacctttatttgtttgtatattaatgatccaaatatacatatacacatatatatatatatttatattactcataagaaatttaaaaattctgcaatagatgtcatggagccaataaaggacttcaggcagggaaatgtcctgttgagattagtaattttgggatgtaatttttgtttggggcaggagcatcagtgatggggtgaagagattgaagctggaggcccaagggtcagtgaggagatgggagctgagaagaggagatgggctggacaggaagctaggaatattcatctcactggaggatgcggggactgagaggggaagtctgccttgatcccaagattgggggtgattagggggctatgtggatagcagtgccattctcagagacaggtgctgtaagaatagttttggggagaaagatagtaaatctgatttgagtttattgagtgggagatatgactatacaagtctaaaattgatcttgcaaagtgggtaggctgataactgtcttttttattttttcctattttgttgatgtgaaaactgtggctcacagaggttgcttgaatgaccaaaatagaaaagagccagggagatatagggctggtcttgaacccaagatgactacattctttaatctcttcattatctgtccacctactagaaagtcatattggaagtgatggatgccagctccccaggcgttcctggcctccttaggattggatgtatccagaaactgactagtgagcagcgcttttaatattttaattaatcattaactggcttgccctctgagcactttttgctcctgctttgaatttttagacagatggcaggcggttatttcctcagctttgtcatctttcacatggcagatgaaatatcaagcacagacttggagaaggatcataattcattataattagtcttctttgatcatttgtcctttgtcctaagtacagtagcaacatttaattgtggctgaagcattagtcaagagcagtgagcaaaatgctctctctctctctgtcttctctcaatatatgcctgagggcaccactgatgttgggaaaccatattctcagttggctttttaaatagctatacagcagcaagtggaaggggcgttgtatttagaagccatgacatgaatatggcctattttccttgatcatgttagtattgttaattaacatactgaccatttagtactgttgtgaggatttaggaaggaaaggagctaactaacattaactgatggcctcctctgtgcttgataatttactgatatgctctcactacctcttcagaacatgtcaaggctggataactgggcaaagtcatgcagctaccacatggcagagaaccaacccctcaactgcctgaatccagaacctatgcatttgtacaagcttgtttatctgcactctcttgtagtgtatttacttaacaagccaagttagattgtaatcgaaagcaggtgctgtcatatcactgcatgaatcttgaaaagcatggctctgagaggtgacactgagagtggcagttgctggataatgtgttgttacaaattaacttcttgccctgccaattaaaaagcactttattgaataaagtaatgatgctcttttatgcctgttgtgtgatttagattttagtagtcaatataattgtatgacttagctttcagtctttacactcacttacccaagtcttatgaatcaggtggggaaatgaaattagttccattttacagatcagagaattgaggctcagttggtgccactgctattgaaggtcagctagcttttaaataatcagactgtagacatgtagattcatgtggcctctcctaaataagatccaagcagtagcaaaaatatgaagacttaggctcaggaaaattttttcttagaagctgacattcagctccaagtcatatggttagggtttgcttctttccacttttcaatttctgacactaagtgataattatagagactgagaagcaccgagtgcatttgctgaagctaattgactcgatggggggaaggctgattgtgcagcggaatccaaactaccaattaaagaagaaggaaatcacatgcacatgatatcttggatatttatatcttggggaactaaaagagccagccttccttgccaccgtggagacagtctgagagtcaaagtgcccggccctggggtggtcagcttgaggcctgggtttggccaagaccgcagccagcagcaccctggtcagcagcttctcagcccctaatgagtgctctggaggctgtgcttctaggctaaaatgggaaatcttggcaaaggaagagattagattcaatgcacaatgagagaggaaatcaggcaaataggagctgcatcaatcaattaattatcagaaaaagggggctcagaatacactaataatgctaacttgtgtacagtgctttggagtttacagagtatatggctctctcaacagcagccacttaagaagcaggagtgtttcccccagcttccagcaggcaagtgcatgccctgcttcccaaatctcctgggcaagaggagctaggccaggaatgcaggcttctgacttatggtcatagctgccgagggctgcctgcattgatgggtcctgggggtggtagtagggagtagacttggtgtggtttgtagctgattctcccaggaactggtttttgtttgtttgtttctaaattctatcttactgaagagcatccctacagtggcacaccagagtggctgcaaggctaacgataatggggctattaactaaataacggtgctggcacaaagaaacagccatgctaggatcttaattaggctctggctgaagcagagatggagcacatttgcaagagatttctggttgactaatctggtgtcaaattaagagtgttctctctgggttgtctcaagtcagtcaccgtatgacttaaaaagttgtctaaacgaagaattccaagtgggccaatttctcaggagaagagaggacttgcttccccaagagctagctccctggaatagattagcaccaggatccctttgtcttcgttgactaacagtttaactttacaggcttctcagctgggagtccactgtttctgtcccactaataagggctgaagtctgtccggctgtgtacctgggttactagagctgaaaagcacttggcagtcctggatgggctgtttatgagtagttcttctatctgcagcagcagttaaatggttctgggaaatgaatcaggatcaaaggggagcttgaggccagggcccagaacctgggctcttagggggtggggggcagcagaacagaacaaagtagtagggaaagcatgatgtcacacggaccttgtatctcacgtgacctctgctcttcccactggttgtggggtagagccatcatgttaattctgctgggcctttttcaatacctttaaaatgggcttattcatttctatgtcatgtaagagtcatgaagtttggatgaggttagagtttatgactctagccagggacacagtaaatactcagggaacagtcgttgcttctggatctatccagcttctttagaggcctgatgtctctatcaggatgtgccttgtgattgcccaggcactcatgcctgtttagattgaggtcccaaccctcctgacttcattggctctgcccagtggtgcactcccttgacctcctctattcttgccgtcacttccaggcacctgtgtctggcttttctcttcagtgaataattcaaatcctatcatcctctgactattcctcctcttctcctccaacctctgtctcttctacttggtacagcaactctgactgcccttggaataacaccctccccagctcaaccactgcctgccagagtcatgaactctagaagcagattccaccaggctttcttccccaaaaagaatatgcatcacaagaggcacttgagtagggagaggggatctctgaagcaatgccctaacccccttctttggctttttgatggattatgttgggtggaaatcaacttcaacatccatcttctagtggaagctgactcctctgattgccactagggagataggggcttaatgaaacagaattattggactaggaaagtataggccttgaaatcgacctgcttctaaaggtaaacaggtaggcagttcaggccaggaagctggaagaagactggtaaataagcaggatgctgcctgaagaacccatgcagaaaggtgatgaatggagatccagcaggcaggtggggtcagcgactctggaaataaggacacagcattaacggtcaggccagtacccaagaaattagacagacatgtgctgctgagaatagggtgaatggaagcagagtctagatcctcaggttaaataaacgatggtcacaggaggaacatggcatagcctggaaggaggggcacacacgatgaggaggtgaggacaggcaaggggaaggggaaggggtattatgctgggtttcaggatttggggccctagtaccctgaccaaaaaaaaaaaaaaacaaaacatattggccatacatttttaagcaggcgaaggcgggtggacagggatccacaaagagcttcaaggatgtgcaagctggtaattccacagactgactttgcagagattctatcaacttatttaaataggggaccgttattgaatttttacctgttccccagcagatagaatcaaatgagacagcatgtgaaggagccctgtaaacagtcaagcactgcactttattgacaagtttatcctttatagaactgctggtgttctgtgagcccattattgtactcactaaatattagctactcaaacatttgctattatgatgtggcagggaaaattgtgaagtattaatttacatttatgcatttcctcttgcccttatccaaaaaggtagcaggctctgggcttcctggcctgcaatacacttctgttcctcattttatctcttccacgctgccaaactcatggtgaatatttaagaggcagaggccctctcagggaaacaagtaaaaatgggatatgttttcctttgatctgaagacaatttgcagtcctggaaaaggaaggaaggattttgaatcctgctgaagagggaacttgtgctctattccctggtagcagaccaggaaggtggcctgctttcagagagagaagactgtgaatccacaccaaggggccccaggaccctaagctgctggacaggaagggaacaagaggacaggaatagtagggcactcactggtgacttgtgacgatggatgtcctgtgactgatgagctaaggcattcatgctaccaaacagctctgggccttctaccactctgagacttaggggcatggtagaggaagggatttaagctcagtcataagtatatttgattttctttcctccttggtagagaaggatatatcatattaaatttaacttgattttaaggaaacgagtaatatggcctttgtgcccatattcatgttgtgtgtgtgtgtatgtgtgtgtgtgtgtattttgaaggtcatatattttgcataactgttatatgatcacatatctcctaagggaaatggaaaacatttgcccagcacctgctatatatgcccctgtttctagcacatcactaaggcaatcaatttgagacttcagaataacctatgaagtattagtgtcctctttatatagataagaaactgagttaaataatgtttaagtgattctgcactaggataggtggttagtgttagaactaggatttaaacccaggtcatgtgatcccaaagctcaacctccctccaccacatcacgctggattccccaagaaggaggaggttagcagtgatgctcctcccttgcatgagaagggtgggcgcctatggcaggaggtttaataactatgaactgtgatataaaataattctcttgaatttatatggaagtgtcagacctttagaggaagtgtcagaccttcagagggggcactgctgagaggctgaatcattgaggtggatgagattacatatgagagaccttcaatgtgacccagatctgttttattttaaaaaacagttatcactgtcctcaccaccatctccctgctgaccaccacctttttaaatctcagcattgaggagagatttctatggatacattggcattgtccaggagacaggtgacacaaaaagacctgacagatttctcctaggcagagaattatgtgaggagggtgttgaattacatctaggaatagaatagtctgctggcgctgcagctacagggaaatgcctcactgaatatcagcaggcactttagatctattgcatctaatggaatcttcagtgtgatttaaagaagtagatattctgatttgattcctgttattttggtggtcatggggaaggatggggagtgatattgagaggagagagagagagaaagaaagggaaggagggaggaagggagaaagaaaaagaatctttgtatttaaatcagtgacaatgggagaaaaaaacaaacaacattcctgatttcttgctatcattgagcataaatatcattatttaactcttatagctcagaaagataagctcccagtcagctaggttttagcttctttgtgaaatgaatgagctcccctgaagctcatcacatgcattcctaaataagtttgtaagggaactacagttattcacttggcctgttgagttcttttcattttgcttttcgaaaatggttcttaagtgaaaagacacatgtttattgcctccttcattctttccctccccttttccctcccttccttccgctttccttcaatttccccctgcttcttttcctgctatgaacacttattgaatgcttgtgtttacaaagcgttgagacaagtacaagggagatagtaatggtcagacacaaagagctcctggtgcactctgtaaagaaacccagatctgtagaaagttaaagaaggacccatggagcaagaggcatatcaaacagaacttaaaggtgagtggcacttcaggagacagagatgcctcttagtggtggtggtggtggtggtcatggtggcgtggtgttgggggaaaggttctgatgaggaatgtgcatgagaaaactgacaaagacgtacagttcagggagtgatcatggctaggccatggtggctagaataggagtgggtatgcatggcatatcagggaccaattgtgaaggtggagagccagcctctgagtacctaggagccaagctattcctctgggtacctggccttgccgaagatttctgagtacataggaagcctggcctgcatgggcatgcagacatgagctctgtgtgtctgaatgcacattagtacaagatgtttacttgatgttgcatttcagattagatggtgaaaatgaatggatattatcattattatttccttctaattacttccttagttaaggtcaaaatagagccagagatgatcattttttcccttgcatctttgaatgtgcatgctaagaaacgcaatgtagtggcaagctaatcgctttcatcccatctcacctagtcaattgtacaaaaaacttgccgtgtttctacttttccagactgtagaagagggaagtgctgggggcctctgtgtgtgctgctgtcaggtgggagccctccctctggcctctttataacctgtttctgagatgcagagctcaaatccaatgccatgtcaaggcacactgtaaaagaagggctttgggtttctgagctcccgtctaaacagatctctatttattgggattaattgatcattaatatttgcagtaaagatatctttcagtgagagtcaagaaacttggtagaaatcgctgaggccttgaagccagatagaggtagatgaaagatctgtcctcactactcatgctgtgggtaacttcacacaagtggctgaaaccctctaggcttcaattttctcctctcttgagaatgtattataaggataatatgagacggaatgtgtaaaacacattataagtactcaataaaagagaacgataattatttaacagtgttagctacagggacagaaatcatggagagttcaatagtactttgttaagactggaaagattctgcaccctcacaatagagttcgtcagaggcccatgactgcctaatggcactttgcaaagaaagctgataagctggaggcaggttccagcagtgcccagaactcagccaggttaaacagcaatgctgtgtctcagtgacaaacctcagtgtcctctggcaatggtcacatttgctgttagctccagctctggttgctgtcctgcctgggttcagctcagcaatccttttgcccactgttgtttccagaaacaagtctcagctccatttcccagaaacagtccttagttgaagtgagagcttccaaccctgcctcctcaagctcccctgccctactcagccttatcagggacctctgtttatacagctaacctgccccattccccagtctgctgtccacacaattccctggttctcccaggggcctggttctgcggctgtctttcttttttgatggtccctgcacctctctgtgcaagagctgacagagactccaggctcctctgtggtcctcttgttgctggactttttccttagttcagctaaaaacgggatccttgtcacatgaccatgaaagattaggcacacagacacttcgaagggtgagaagggcaggctttattggatgaaaaggggaaaaagggaaatagtgactctcagcaaagcaagagtcctgcaagtagacttcctacctcacagattgaaacccatttgaccaccctggaactcgagaggccaggcgcctctcccctacaaacggtccgaacttcccacggctccaccccattctcccagtgtgcaggcctgttggaggctctctggggatctctttaaacttggctgtctcactctctgttacctggttgcctgctggctgtcaacccacctgaactattgagagatcatgggacattctgaaggcatttcttaatgttcctcctctggcccagtttaaatgacatcttctctgcaaactatattacataaagcttttttattttaacctataggcttactttttctcaaagaaaaattgtaacataacttcagggaaaattaaaactgaaagaattctattcgtaatcaaggtttgcgactgggcacggtggctcatgcctgtaatcccagcactttgggagcccgaggcaggcagatcacaagttcaagacctgcctggccaacatggtgaaaccccgtctctactaaaaatacaaaaatgtggcaggcacctataatcccagctactcctgaggctgaggcaggagaatcacttgaacccaggaggcagaggttgcagtgagctgagatggtgccattgcactccagcctgggctacaagagcaagactccatctcgaaaaaaaaaaaaatcaaggtttgtatatttcttaaagtttggagccaaattataattgattcattcagcaaataaccaagcatctactgtgagggactgtgtatgagccaagtaggataaattacttaatatgagtggatggtggagataaatcatacttgaaattgaaaaaaaaaaatactagaacaaatcctgtctcttgctcctatgtaaccataatcctttaatcttcaaattaaccatggtcaaattcttaatatcttttaccacctataaaaagattggtcagtctttgaaaaattaaacagacatttgggtcccagagcctggggcattgaacacattttattcgaaataggttttgtatggatgtgtgcctattccatgtagaagcagacatagcgagatggagatacagcaaggaagccccttaaaatacactagttcaatgatgagaaatgcactttctgcaaaaacagcttcacaggtatataagtgacagttcggagtcctttgattggtgtttttgaaaagagagattgagattaagagaatttgtgctgatttccaatagctcttctaccttaaaatattttttatgacagaggctacttattacaatattttcaaatgggttatcaagcatcgccgttttatggcaattccccttcgggtatccctgtccaaataatgtgcatttctacttgactaattcatttaggaggacaacagacacctcaggggagacatttaaagtctttcttcagaaggactcccatgtgtggtaatgagagcatgttttccccttttctttcttctcttccattatctcagataacaggaattaattagtgtcctacagtcttttactttaaactccactttaagagactcatctactaagtgactttgttgttttattattttgttttgatttttcttattcttgaaaacaccagggctgcttctagaatttcttgaataagccaagccaacaataggcacaatgctgccttttctgtgggtaaatacccactcttcactaagggaaggggtgtggtgcagacattgtaggaaagtggtgctcattttccttctgagctgatgcacagtgcctgctgcagtttctaaaaacagcctgctaacataacaatataccaacttcaggaaaattagtgtgggctttctgtgaacacacccagttgttgacacactttctaaagcaatcctgtgattgtacagtcatggtgctagacagtgtgatgtctgtgcgcaccagcttgcttttctgcagtgttcactctatcaagctaaaatggagtgcctattcagaaccacgcactgagctgtgtgttttagtgggtgaagaaaggaactgctctttgccctttagaaatttagagggtgactagagttataaagtaaggaagaaataaatggattatagaccaaatgcagccagcgtcatggagaggtatagtaaatgtattaggggtgacaaaaattgtttttcagtttaaaagagtcaacagactggtgtcagcaagatttcccccatggcaacatgaaaacaaacaaacaaaccaacaaacaaacaaaaccagcaactagaaacggactaaaataactttgtagggactcggaaattggcaaaggtatacagcaaccaaataaacacccaatcatggaaaagccacattcaaaatgatggggagctttgtggcattttcacttgccattgcccctttgccttcccagtgtcgttcagcacagtatgagggagttggtggcccagtcctcagctcccttcggtgaactgaagattgcagagaactgagtttgcaacatcctaacttgtcttcaggctgcttgaggtgtcactaactcagtgtataaaagagcaaaactagatttgaccgcagtctgaaggaagccatgggaagcagtggtgatgcctcatgaaaactgcaaggagctacaaacgtgaagacccctgagacaagagattgcctgctgaggaatacaattgaacagctaaggcccagaggagaagtaggggtgtgactcttagataaaataagacatttaaaaactatcatgtatatgaagaattgggggaaaaaatgatgcattcacaggaccaggaatatacatgttcagaacagtccctcaagccttaagagaggactttaaggctttatgtcataccgatgagtgaatgccttcttctgcatggactatgtgcagagactggagaggtgtctgtgtctgttttttgcaagtactctattttctatgagagatcagagatatacaaagaaatatgaatgcatggtccattcaaaggaaaaaacaaaatccccagaaatagtctctgaagaaatataggcactgagcttactagataaagacttttaaatagctgacttaaattttctcaaggagctaaagaaaaacatgaatggatgactaaaataaatcaggaatattatatatgaacaaaatgagaatatcaacaaagagataatatattttaaaaagaagtaaacaaattatggagctaaaacatacaataacaactgaaaatttcactagaagggttcaacagcagatttgaagaaacagaagaactaatcatagaacttgaagacaagtcatttgacattattgaatctgaaaaagaaaaaggaaaaatgaatgaagaaaagtgaatggagcctcagggatgtgtgggccattaccaaggggaccaatgtatgtactacaggagtccaagaaagagaagcaggagagaaagaggaagatatcttatttaaagaaataatgactgaaaacatactaaatttaggaaagaaatgaatatacaaatacaagaagctcagtgaactccaaataggataaattcagagagagtgtacctatattaagacaaattataataaaagtattgaattcaaagacaaagaaagcatcttgaaagcagcaagagaaaagccaggtatgataattccttctaagattatcagcatatttctcttgagaaacactgcaggccagagggcagcgggatggtgtatttaatgtgccgaaagaaaaaaaaaaggaagaaaaaaaacttatcaaccaagatcttaaatccacagcctagctttatactttaaaaacctcgaaaaacagcaagaaaaagctagcagaaagaaataacaaagattggagcagatagacacaaaatagagaacagaaaaagaatagaaaaaatatatataaatgaaacaatgagttggttcattgaaattttaaataaaattgaccaacctttagctagattaactatgattgagagaaaagactcaactaaattcagaaatgaaagagggaaaaatactaacaccaattttattgaaatacaaataattataagacagtattataaacaatataaccaacaaattggataatctaggggaaatggccaaattcctaaaaacatacaacctactaagactgaatcataaagacatagaaaatctgaatggacatataattatccaagacattgcatcagtaatgaaggagctcctgagaaagaaaagcccaggaacagatggcttcatgggtgaatagaatagaaagccaagaagtaaacttttacatatatggttaaatgcttttctacaaagataccaaaaccattaaatgagaaaataacagtcttttcaaaaaattatattggaaaaattggatattcacatgcaaaaaaattaagttagacccttatcttacactataaaacaattaactgaaagtggatcaaatacttaaatgtaaatttaaaatgctaaaaatattagaagaaatacaggggaaaagcttcatgacattggatctggcaatgatcttttggaaatgacatcaaagccataagcaacagcaacaagaaacataaattgaactacatcaaaattaaaaactttcatgcattaaagaatgttatcaatagagtgaaaaggcaacccatggaatgggagaaaacatttgaaaattacacatctgataagcagttaaggtccaaaatatatagagttcctacaacttgacaattaaaaaacaacttgatttaaaaaaagagcaaatgacttgaatagacatttctccaaagaaaatatccaaatggccaataagcacatgaaaagaaattcaacatcaacaatcactagggcaaggcaaatcaaaagcatgaaaacatagtccctcacagtcatgaggatggctaatatgaaaaacaaagcaaaacagacaaaacaacaaaacaaaaaacaagttttggtgagaatgtggagaaatgacatccttgtgcactgctggtaaggatgtaaaatggtgcagccactgtggaatagtatgtcagttcctcaaaaaattaaaaataaaactactttatgatccagcaatttcacttgtaggtatatactcgaaataattgaaagcagggacttcaagagatattgatacactcatgttcatagcagcagtattcataatagccaaaggtgaagtcaatccaagagtcctttgatggatgaatacatgaacaaaatatggtatatatacacaatggaatattgttcagccttaaaaaggaagaaaattcgaacacatgctacagcatgaatgcatcttgaagacattatgctaagtaaaacaaacctgtccaaaaaggtcaaatactgaatggctctccttatatgaggtaccaaaagtaatcaaattcatagagacaaagagtggaatgttggttgccaagggatgtgtatagagggaaatggggagttattgtttgacagttacagatattcagtttgggatgatgaaaaagttctggaaatgatactgataatggtcacacaacaatgtacttaataccactgaagagtatacttaaaaatggttaaataagaaatttaacataatgtatattatactacaataaaaaatagtaaagttttttgaaaagaatcaaaataagccttatggaataaatgtcatttgacacgtgagttccgagttcatccagttaattcatccagactttcccttttggaaaggatggatgacaagtctggcactacttctgggccagggtgaacagcagaatctgagtataaaaccacatgtgaactagtgctgcagaagctgatgttcaaaaaggtccataaaatcaaaagagaggccaagtgtggggattccatatggagaaccatgaggactgatggcaaagatccccagaatgcaccaggagaataagaaggagaacaagaacctcaactgtgacctgagacatgggaataccaaatccacacaaggagttaagggaggaaatgtcaagtagggtctcacgagcagagttgggttccagaagaaagaacatgaccaacgcagtgagatgagaaataggtttattgagatacataataataataatgccaacatagaccactaagggctttaatgtatatgagcacagggacccattaactggattgtattattatcccttttgccattggtaattttcctattatgtgtccgagcaagtatttgaacccaaagacctcagagcccatgcccttgaccacttatgctatagagagagaattagctgagtataacacaaaacatgaagtcatttgaatcacattttaaagggctgaccttcagatggtggcatttactgggccttgtggaaccttgatgttttttagcaggcaagagatgagaacagaaattactctgggaagacaatttggcaacacagaaatgaaataatttgatgaatgtcaaggctgaaattagggagatcagttagggaacatagaggaataaggcataaaccgaggggacaggaatggaatgtgtggactcaaaaacctttgaggaagttgaatcaagtggatttagctactaattagctgaacagtgccaagactccgggagagtctgcaatgactctgggacatctgaaactatggtgaggccaagtgtgcaatgatgtaagcagggataaggaaaacgggactactctgtggtggttggaattaattgtcagaaatccccaatcaaatcccctctgggatttgaagaatacatttttaagatgcataattagtctgaaagtaataacatgaatcctaaaatgcttacgaatccctttactaccatggatactaagctctttaatagggcacaagaacctctgttaactgggtgagatttaggagttcagcaatcacaagacagctccagctatttgagattatgctgagtgttggcttgtgtcactcttttttttttttttttttttttttttttaatttatttttttattgataattcttgggtgtttctcacagagggggatttggcagggtcatgggacaatagtggagggaaggtcagcagataaacaagtgaacaaaggtctctggttttcctaggcagaggaccctgcggccttccgcagtgtttgtgtccctgattacttgagattagggattggtgatgactcttaacgagcatgctgccttcaagcatctgtttaacaaagcacatcttgcaccgcccttaatccatttaaccctgagtggacacagcacatgtttcagagagcacagggttgggggtaaggtcacagatcaacaggatcccaaggcagaggaatttttcttagtgcagaacaaaatgaaaagtctcccatgtctacttctttctacacagacacggcaaccatcggaaaggtggggaaaagattgagaaatccgatggcttgtgtcactcttgaaaattactttgaagtcttttagacttatcctattatatccttttatatgccacgccagttgaaacttggaaataattaaaaacaatagacaagaacctgctaatcttttatggtattcttctatttaggaaataattgattgggcgaagtggattacatttcaatattcagacaggctccttttgttattacttttgactctatctgctttttaaattaccttgcctattttgaaagcacagtacagttttcttatgtttctctttttggtgcaagacaatgtagaaaggctcatggtgtaaaggtgaaggatatccactatccaatttaatatccttacatgactaacatttttagagaaatagtcctttgaaattaataggaggtgatgtgacagtggaaaaaaatgtaaaaatcaatcagacttgattttcaatactggtgctggcacttaagagctttgggattttggaaattgaattaaataattgatcctcaatttctttgtctgaaatataggaataaaaatacctttaactcagggttattatgaggtttggtacatacgtatatttatatgtaactatatgtatacacacagacatacacatcacacctatagacagagaggaaggggggaagagaggatatgcacgcgtgtgtagtcttggcacatagtaaaaaaactggccgggcgcggtggctcatgcctgtaatcccagcaccttgggagacagaggtgggcggatcacctgaggtcaggagttggagggaaaaaaaaaaaaacagctgggcgtggtgatgcatgcctgtaatccccagctacttgggagtctgaggcaggagaatcgcttgaacccgggaggcagaggttgcggtgagccgaggtcgcgccattgcactccagcatggacaacaagagcaaaactctgtctcaaaaaaaaaaaaaaaaaaaaaagcccggcaccggggctcatgcctgtaatcccagcacgttgggaggccgaggcgggcggatcacgaggtcaggagattgagaccatcctggctaacatggtaaaactccgtctctactaaaaacacaaaaaaattagcggggcgtggtggtgggcgcctgcagtcccagctacttggaaggctgaggcaggagaatggcgtgaacctggagcgcggagtttgcagtgagccgagatggcgccactgcactccagcctgggctacagagcgagactgcgtctcaaaaacaaaaacaaaaacaaaaacaaacaaaaaaaccttaccatttaaaaaacgtgttctgtcctgccctaagaaagaatgcctaatgtttttgaggttcatctgctatgataaatgaaagaagccaaactcgaaagattgcgtattgcaggatttcattcataagaaaggtcaaaaattcacaaatttaattaggacacaaagtagattagtggttgtctaggattgggtagtggggttgataatggcaatttacaagtataaggtttattttctttttgcagtgggaaatatcttaacattagatttgtggtaatggttgcaccactctgtaaatgtactaataatcattgaattgcacacattcaacaggtgatgtttaagctatagtaattacatcaccaaaaagtcattttaaaataaaaaggatgatatttctgtatactaagctgactatcctaagtaaaataattggtgcttatgaaaaaaagaaacattatttgtgctttggggttaaggaagtctctcctgtatttgtctttaaatatttctttttgtgtgttgaccatttttttggtaataactccccaaatcagagtggtatatgagaatcattttctcatttacattacatattggcatctattcaggtctgtttgtgttttgccagccccactctgctctgattagctctggtccacacgtattcatacagcccgtgcatggcacatgcttattctcatggcacaagagaaaactaagccaaacctattagcacttaaagcttctgcacagatataccctgtttcatagctgcttccgtgtcattggctaacgcagctcacatggtcaagcctagtgctgatggaagtaaacttgcacttctaccatggagtgaggggattatgaatatttctgaacaataatacaatgagacaatctaccagtgttggaggacgatttggctaacatcctgacttgagcttaatcctctatcagtgcttcccatcccttctactctcttactatccaaagtatatctcatcttcctcttttcccactgggatttactgtaaacccttttctcctccaccatgaaaaactctgccaaggagcttgctgtcattcccagctaccatctcatgccttccatttcttgtactgccagacttcacaattatgaccaattggtgtccttactatttctctatcatacattgtttttatttctctatcatatttaactgcgttatgacttgaaacttctcaatccattggatttactctttctaaagcctctaatggccttagttgccaaatccatgacatttcttcagccattatttattttgatggtagtcatatttgtaccgtgaactcataaagtgcagcgtgtctgatcccccttatttgccaggttccacattcttctcccccacacttccttcctgtgtgatctggtatagtcccaggttttactttctgagagtgtgactcccatattaacatgtttatttctggctttcttaagtaagaaattaaagggtcaaaatgattactctatttaattaatcattcatttacatattaacattgctaatctgtttttgaacaggatggaaacagaaaacacttctctgggaaatttaaaggtaatcttaggtttaataattctattcataaatattactgtatgtagttgaaattagttcacaaattataaattacaattctaggccgggcacgatggctcacacctttaattttagcactttgggaggccgaggcaggcggatcacttgaggtcaggagttcaaaaccagcctggctaacatggtaaaaacgcatctctactaaaaacacaaaaaagtgagccaggcatggtggtgggtgcctgtaatcttagctactttggaggctgagacaggagaactgtttgaacccgggaggcagaagttgcagtgagctgagatcacgccactgcacttcaggctgggcagtagagtgagactccatctcaaaaagaaaaaattacaattctgtagtagaaatacagtattatgtttcgaagcacagcttagctcaatgcctgtatctagtgatttttctctccatttttaaaaccaaacatatacaaataggaaatattagggattatacgtgtagaattagatgtgctctgtgaaaaaaaaaatccacatgtagaattatgcaaaatacttgggcaaatgtaaatataccacaactgtttttattaaatcactatttttagttatcatgttgtctttatgagcattgagcacacttagtagaaaggctgccacactgtgtttagccttgtcatcctggaacaagatttttcatcttgaatagtctgataccaagactgaacccatctactgcaaagacctgtgttctgggaacgcaaagaatattctgacccccttttccagtattgagctgaaatcacaaagattttgtggtatagtgataagagctgtaagatttgggtttctattcctggcactaaccttggagtacggggacttgggagaggtgtggtgtagggaaacaggcaaggtcagtgctacacagagtgtgattcttggataggcaccatcaaagggaccacggagcttggtagaaatacgcatttctaggtttcacccagacccacccagacctgctatatcagagtcttagggttgagggccagccgcctattataaccagctatcttgatgtttcaagtgcttattaaagtttaggaagcacagggatagtcatctctacttaggcaatgaggttttgttaatcttcatagaggtgcaattatgggaggaaaatggtagtgagtaggagattgtggttgataatgatgtacctacaggattacagtgtgggggcaaatgagagagagtcataaatacagagtctgagtgaaccaaaatgagccttggagggagtaaatcttactgtagacaagcatcaagtttaccaaccagcacagatcctacaatcttgcaaggatgcaagaattttcttaaatgggttaacaagtaacttcagttcaaaaaattccaacattcaaagtttctgtccaggaaaggcagggcagatgggcccaaacagatgaaaaaaagtaatttgatgtgggggatttctaggaatatatgcactccctacttgtccatgcagaaccttattcagagaccagcctggcctttgctagagaactggacttcaaaattgaaagggactaacacaatgatgatgcttttattatggaaaagaaaacatgatttgcatacagagtcaggtgagtgcagtggtgactgggtctcccagatggaggccagctcttccttctgccctttaaagggtccagcaacttctgactttgagctctcaaagcagcttccttgcttggtcatctcaaactccgtggacctttgtagaactgagaaaataatctggctttcaaatggtaattcttgtatgttttcataaagatgttggtgatgatgacatgatgttgctgatgatgtaaagtaggcaatgctagtagtagatgtagtaggtgtttcccctctgtttaatgtagatggcttcccagaaaattgcaatgtagcttttcacatttcacacacaaacacacacacgccaggccctattccccttttaaaaaggttttcctctctgtcactaacggagatttcctagaatcacaacttgggttggaaaggagggacatcaccagttgctcaagtttagttcatgggaaataatctctggctaccccagcacctgagcgtcctggtggatttcatgactgtatgcattgctcttgatttgcctgctagtgtatgggcacaaacaagggtttggaatttagaaatggcaacaaatctgccttttaactcttatgactacttctaagaaaattaaagaaaatgctatatgcattagattttaatttgcttttcatattcagagaccatctggaaatgtaattatagttcaaacttttaatctccagtgcctagacaagctttttaaaattgtatttgaatctgtaaacagacacgctggttttttctataatggcttatttgttttgcaataaaacagtgtaatgatttaaaacagggtcgcatacctgcccattcccacctggactgacacttagaatctgggatacatatggatatttagtgaatgagccaaatccctgtttttcattcctgacttttaagtacactttgtgtactacagtgggtgagacgttaagtttcagaattaatctaagatggttctgaacccaggtatcaccacattttggctttgtgtccttggccaaaagatttaacctcactgagccttggtcttattttttgtaaaataggagattataatagctttgtccttgggtttgttctgaagactaaatgagatgatatatgtaaagaatttagtactgtgcctggcacaagtcaacaataacagttttgttgtcattactgttattgttttaaagttgtagctactatttattgttattttattttaaaaaattcttgtctgtttgtcccttacataagctatctttggcattaattacatctacaaattcccagttgtcacttgatctgatttgctttacttccaatcacagtggtccctgctctttagcatgcagggctacatttgtcagtgattaccttatgaaataccctggtgcaaagccagaatttaatatgaagatcttgtcaggagagctacattcctagtacagtcacaatgttggcaaagaatatagttggactagaggactttttagatctttccaggtctgagatctgggacttccagagtctctaatctccgtaaagagaacagtaatgtcttgtcccatttctgtatgcaagagtgatgtatgtgattctgccagctttttccagaatactcactactagtgactaacactttttagtgttaaccatctaaaagattgggaataatgtcagtttgcatacctataaagtaaaaatgataccatgggaagggtatgctgcagtatgaacaagataatatgtttatagcacccttcacaatacaccttgctccatgctagcacggttagacattgtctctggaatgctactgtgatacttgttcattacgaccccagtgtagggctcaggaacttaactacacaactgtgtccccactataaccctgctctaaccaaatagtcttacaagcctccaatgccctgactgaattcaaagatgagctgatttttagataaacttgcaaaggaatataaccttaaatgatctcctatttataatttataaaacacacttatacaaattgataatgatgtatgtttgaataattcaagaaacaggatgtcaatagattttagcaccaagtaccaagaaagcttctgcttgtgaatattaatttgactaatttgagatattaggccatctagtatggtaagcatatttgcagagtagtaggattttcgaagggtaatctaatcagaaatgggccaactagcatttgtaaaaaatgtaacaattacctgaagatctcatatgagatattttgcaactggcaaagagcaagataccctaagtaaaatgtaactgagcaccaaattaaatattgggaaaatgtctggaaagaatccatagtaagttgctttgttttgtactgtgctttcctcctatttatacaaatacatttatagatgagtatagacatttatagtctgagtagtttcatttatatgaccacaaaagtacaggcagcaaaagcaaaaaaaaataggctggtgaggcttctgtacagaaaaagaaacagttaagggagttaaaggattacctatggagcaggagaaaatattaactgctctatatctaataaggactcaatatctaaaaatgtaagaaacttctacaactcaataacaaaaaagtaataataacccaattaaaaaatggaagtggacttgaatagacatttcttcaaagaatgcatacaaatgtcccacagatacatgaaaaggtgttcaacatcactaatcgtcagggaaacgcaagtcaaaaccaaaatgaaatatcatctcacacttctgagcatggccattatcaaagaaacaaactagcagaaaataacaagtgttggagagaggatgtggagaaattggaacccttgtatattattggtgggactgtaaaatagtgcagctactactgaaaacagtatgaatgttcctcaaaaaactgaaaatcaaaataattgaaatcagtttttcaaagagatatttgtactcccatattcaatgaagcattattcatagtagtcaagaggtagaaaaagcctaaatgtccattggcaggtgaatggacaaagaaattgttgctcatgcctataatggatttttttttttttgagatggagtcttgctctgtcgcccaggctggagtgcagtggtgcaatcttggctcactgcaacctctgtctcccgggttgaagcaattcttctgcctcagcctcccaagtagctgggattacaggcatgtgccaccccacctggctaattttggtatttttagtagagaagggtttcaccatgttggcgaggctggtctcgaactcctgacctcgtgatctgcccacctcagcctcccaaagtgctgggattacaggcgtgagccaccacacccggccacaatggataccatgagatatcattcagccataagaatggaggaaattctgtcaaatgctataacatggatcaactttgagggcattatgttaagtgaaataagccagtcacagaaggacaaatgctatatgattccacttataggagatctctaaatcagccgaacccacagaagcagaaagtggaatggtacttgctagggcctgggaagggctgatcagagtatagagtttcagtcatgtaagttgtaaagttataaagatcttctgtaaaccattgtgcttatagttaacaatactgtactgaacacaaaagtttaagaggtttaacataatggttattatatatgtataatatatgtatatataatacactatatatatctattatatagatatatctattatatagatatatatataatttttcatcatcaatgtgctaaatcctgaggatacaaagaataaaagtatattttgctttgttcttgtaacataaacctatatataaataaacagaaattgtaagtcagtataaaagccagatacttcatcgtcctgcaagtatgtaaatgcattttaaaatgaacaccttagaaaggggattgtggattcagtttccagtgactaatttatgtctacattgggaggaatgtgtaagtctaatacacgctttctatcattgttttattttaatcctccacacaaacttgggtaacactattctgtgaaccacctgagggaccagctttgtaaccctgagtggaggttaatatatattaaaaaatagtgttataatgagtgcactccagtctccagaatccaggttaaacatgtcatcatgaccagaggccattgctaattttactttcatgtgaatctctttttaggcttcacatctagttgggattatttagaaatgaccaagactacaattattatacacagtttattagaaaaagaaaaggcatttgcctttatgttattgatttatttacttgtgttagttttaagaaaagacaaacagatcagatatagaaacacagcaatgctattttctatcaaattcctctgggtgtctcatgaaaatcttgcatattgaattttaaatccaattcgtgcagcccagaatgacatttcagtatattatgagttgtagtcaatatattgattacagtctctttgggcttacaatgattaaagaccatcacatggatacagtatttgtttagcagacaattctcaagattttcatgtgtgatacagaagccctaacaattatattgtatgtgtgccaaatgtttttcaaggctattgaaaataagaaaatttaattaaaatggtgtgaattcatttaaatttgtatggagagaatgggagatataattatgagcctgttcttggttgtttattgcatgaagttggctacttggtaatttcaagaccatggtaaaccagggttattttgaagtcatcaacaagtcatccttggaaagaacttccaattcttaagcaccttatacctgcctggtatgctaaacatacaaactcatttactcttcacagccatcttccacagaaatgttattatttccaaatgtggaaactgagacttctagaggacacgtagtttgccaaaggccacacaaatccagtagggctgaacttagaatgaggcctccaaaactgcaagtaaaatttaaataaatacaaaataacttactttgattaaatctggactacattgagaaagcccttgttttgtttttatcacacagctctcataaaattattattattttttaattgcaaagtatgctaagtacaaaatggtagctccaactttagtctgaataactacaatctccactgagggatttctttccaacaacagtgttccatggaagcagagatgacttttgtggtctcaagtggacttggccctcaaaggggaagctgcctctgagggtggggttattcactccaactctgggggctgtgaagccatctccagggatggcatgaccagttgggtcttgaatggagagttacataaaacctcaggaattaatgatttaataccatattctgtatttattttcttattttttcatgaagatcttcataccatagggtctcaaatatttaggaaaaaaaatgtttggattaaaccttctatcacattactcttgccttgaattgtgaatttttaaaaatgaaatttcagttgggatcacttttgtgtccagttacctaatatatatataggcctaatcaataataaacatgactactatttatgcataccaggtgctctgctaggagcttttgtttaattagcccagtacactcacacagcccatatgagactagtattgtaaaccacatatacagatgagataatgggggtttagaaaagctcattagcttgcctaaattcaccaactagtgtgattaaaattggatgtgaatgcagagctagttgattcggaaatgggtgctttaataatactattcagttcctatattttttaacatatccccacatagtgtattaacatgttcttagagatatatggagaaggaaaattcacctaaaaatctataccagggaacagttagcaatctttgtttaggttcatctgaagtttctgtaggcagttttctggaataagcttctctatggctggtattgcatcagcagcagtttcaatagggcagtctctgtgtctagagctcaagaaaatcagagcctgggtcatggtaggtaggcaaaggctgaggcagcaatgtcactcttaggagggaagcaataacctaagccaaataaatggtcatagtacaccctcaacctaaggtattgtcacaaacagggggctggagcctggattcattcatcaaagagcatgcctgttgattgtgcagaaggcatccattttagagaatttggatctttgagacatggtagagcaaacaaaacaaatgacatttatttcacacttgatatatgccagacattatgccaggcaattcatttgcacaactttattgtattcttatcaaaatctattgaaaaaagtattgttatctcatttcaagatgaagatgctaggacttaaaaaaaagtttttggatcaacattatacagctactaagcaagatactacgatataaaccctttctgtgcatctttccacagcccagtgctgttttcctggagattgctactgaaagtcattttcaacctcatacctggaaagatagggaagccaaggcacagagaagatgaatgatttctctgaggtcataaaactattaagtgccagaaccaggttttactgccagtctatttgatttcaaaattatttcaattagatcattgccatctctatgttaatatatcgttaatccttaagaaaactgtcatctgacccaaactcccacaccagcagccaacttgcttctttgcttctgttgctgcaaaactcttttaagatgtatctacactcaggttggcagttcctctacttctggcagccagttcctctacttctgttctcctaactttttcagattgcttttcccctctcatgctcatacagaagtcatccggatcccatactgctcaatcgatgaccaattcccagtcttgggtgatctatcagcaaggccatcttgcccttctattgggtaaactttgttcaaatggctcctagtgtcatatatactcagtctttctcctaccttgctgaacaccctttcttacttctctccaagctcttcacacaggagcatcttttttttgatgctcttgtctcttgctttctcctcatgactttggtgaatttatcccatgttcataactctatgtatcacctacatttcaacaacattaaaaattatagcttcagctgagacctgctttccaaactctagacttgtatttgcaaatgtctaccttatatccctatttggctgtctaacagatatttaagacaatatctccagtacttgattcctattcttccctcaaaacctgcttcaccagctgcctctctcatctcaagaatctgcatctttctcattattgctactgttaacacactgatccaaaccattatcatttcttgtctggattatttaaaataaataataaaaaactaaatatttaatgggatttcctacttcaaactcagttcatctagggtctgttttcaatatggcagccaatatggcagcgtgaccaaaatgtgtcccgttatgtcattcccattctcaaaaatgacctcaccatctgactcagaaacagttgaaacatttacaatggtcttcttctgagctcctctctctttctctacacccatcataccatcacattccagctgtaggatgttggctgtagaattttgcactggttgagttgccctatccccagatatcagctttaataactacctcatccttttcaagtctttgtccatgttttacactctcagtaatccctactctgaactatctaacgaagtaaactgcctgccatcttattttgtcctcctgattctgcctatgctgttcccataaaatatatatatatatatatatataaaataaagatgcatcgctttctaacactctagataatgtgtttatttagcatggatattgcttattgttggttttctcccctagaatgtaaataccacaagggcataaatttggtctttttaccactagtgtattttgagcacttaaaacagtgcctgagacataataggtcctcaaaaaatacttgttgaatgagataataaaagtaagtatattgcagaccttttttagccatcttaactttgcagaaatttaagtatctaatctgaagtatctgagggtacatttttcccctcataatctctgctatttaactagtgtctaatttcctaccaattagtctatgtaaatttatttcaggcttcatataaaccactgagcagctcaatgatattgatctttactgccatttaatggggttggtcagtgatcaactccaggcaagaccctgaatcagcttttacttatctgccctctggcatgtaaataagtggacaaatgtctgcaaactcatgagacccttcctcttttccttaaatgttgtcatatgcctatctgtgctctttctttggttagaaaaataaagggaatttaaaatctttggaataacaggaagaactagaatcattcataagtattttcttcaactttactctaattgccctaagattaatctcttgttacaacagcaaagtctagcctctctagaattccttgaacactgtatttcaataatttgatcctcatggacagtgaatctatctgtcacagtcagttgtcctttcactctttgaatcaattggcgtttacccatatcaaactctatttgtccatcacttctaaaactcttgataatttccaattgctcatggagctgagcttgaaggttgacatggatcatccattctttccagaatgacaaatagcattacatggtgatcctcacattttatcttaatttcttggcaaatgttaatttaattttctgctaaatggtttcaatctcatgcagaaccaaagtgaactaagttaactatctcagaaatatcccctgtcttgtcaggataattatttctttcatttaaatgaaaattaagtaacactctctggtgatttttttagatcatcaacataatttctgatgtcactgtgaacctctgagacacgttaagcttaaatttccccctaggctcaaagtggttatatgaatttacttgttcaaaagagattgcatagaaacctaacacaaactgacggcatcttggagctaaaagtagtcttaggtattatgaaacccagtcataacagagtttgcaagtagagaaactgaagctcagaaaggaaagttgaatgtataagttcacattgcaccaaattgggcagagacgaatagcaaaccttggtcttttgacttagtccaataaagctataaaattacatgcaaatgttggtgaatatttgcagaacatttgtttgagaaacgtgtccttagcaatttatcacaaaggtcagtgatctctctaatgttaggcaccaaggtccacttcactattttacagacacagttggcccagggtccatgtaaagttaatccaagaatccatgtaaaactaaattgagctttgtattcagttttaaacaatagtaacttctttcttactaatgagcatggatggattagttgggtatccctgctggggcattggattgctgtgacttcagtgctctctggaacaagcgcagtccaggtgcctgtgtgtggagaagataaaacacttgatgttcaggtttgtttttttttttaatttcaatttttattttaagttctgaggtacatgtctaggatgtgcaggtttgttacataggtaaatgtgtgccatggtggtttgctgcacctatcaacccatcacttaggtgttaagcccaggatacactagctatttttcctaatgctctccctaccctgacctaaccccctaacaggccccagttcgtgttgttcctctccctgtgtctatgtgttctcattgttcagctcctacttataagtgaggacatgcgatgtttggttttctgtttctgtgttagtttgctgaggataatggctttcagctccatccatgtccctgtaaaggacaagatcttgttcctttttatggctgcatagtattccatggtgtatatgtaccacattttctttatccagtctatcactgatggacatttgggttaattctgtgtctttgctgttgtgaatagtgctgcaatgaacatacatgtccatgtatctttgtaacagagtaatttatattcctctaggtatatacctagaagaaaatataggaaataccattcaggacatagggatgggcaaagatttcatgatgaaagtgccaaaagcaattgcagcaaaagcaaaaattgacaaatgggatctcattacattaagtagcttctgcacagcaaaagaaactatcatcagaggaaacaggcaacctacagagtgggagaccatttctgcattctattcatctgacaaacatctaatatccagaatctacacggaacttaaacttacaacaaaaaacagccccattaaaaagtgggcaaaagacatgaacaaacacttctcaaaagaagacactcatgaagccaataaacatatgacaaaaagttcaacatcactgattattagagaaatgcaaatcaaaaccacaatgaaataccatctcacaccagtcagaatggcgattattaaaaactcaaggtacaacacatgctggcaaagttgcagagaaataggaatgcttttacactattggagggaatgtaaattagttcaaccattgtggaagacagtgtggcgattcctcaaggatctagaaccagaaatatcatttgacccagcactcccattactgaagttcagtatttctaaacagagaagataattagttttttatcttctgttgacttctacctctcctccgcaaagatttcaattagtaaaaataaaagctaacacacacataggtaagaaaactcaaatacgatctccttttgcaaaatttttattatgagattttgaaataataggacgtgtgatgatatgtaaattccttccactatagcttttgaggttgtgtgtgtatgtgtaagtgcgaatgtgtgtgtgtgtgtgtgtatggatttgcgtgagaattagatattaacattaaaaaacttatttttccatcatatatcagaaaacatgatttttaataaatgtatcatctaatatgcaaagatgtattacaagaaaaaaattaatatgcctgctttgccactaaatccatcacccccaggcattctcattctcccttctaaagcccatttttcatctgtaagtgaaagaattgaactagtttgctaagaccctttgttaataatcagtgtgtatgtggtgacttgctactaaactcaaactgcaggtcacctccaccattttctgagacagaaattgtatgagcagtttttttgcgtgattgaaaataatatatgcatgtgagacattggcagctaagaacttggctattatatgcatatcagacaccgtgataggctgatcctactctttcttttttctttttttttttaatttttgagacagtgtcttgctctgtcacccaggctgcaatgcagtggcacgatctccactcactgcaacctccacctcccgggttcaagcaattctcctgcctcagcctcccgagtagctgagattacaggtgcgggccaccacacccagctaatttttgtatttttaatagagatggggtttcatcatgccaggctagtttcaaactcctgacctcgtgatctgcccgtctcggcctcccaaagtgctgggattacaggcgtgagccactgcgccaggccgatccctgctctttcttaatcatagctttgaacagttgtagtcccaaggctatccctcttatggttttaaagttgacccttctggcattataataagttatgcactctaggatttttcattgagaaaagactaagaattgattttaatctcagatcttacagttcagcaaacagctttttcctacttgattttttttttgtcccatatccctttcccatgcatttctcttttgctcttctctcccttccatttacccaactaggtctcacatctcagaatcagatgtaatagatttttgtgtttccacctagtactgttttcccagagtaatctgggaaagttgggcacgcctagcagacaacatagactttgtggaatatccttcttccacaacttaaagggtcttctttacaaaattacaaatctttacaaaattacagttaaaaggtcttagcagaagccctaagaaagtgggagcccaaagggtaagcctcatcaaattcctggtaaatccatatatgtccatctctgtctggctgtgtctacttttgtatgttccaatgttttagagtgcagacacacacacacacacacacacacacacacaaagatgcaaaatgctggtgtcctgccactttctctttggcagaatgtgagactaaaaacattctcagtgagttcttgcctaaagaatgtaggactattttgaaggctccagaggacaattaataagattttatttttctttttattagaatttacatttattgacgttcataaagaagctgataactgcttagaatatgaactcagatatggtctctctgacaagatgccctcctgcacaaaatgttggcattagcattatgcatgcaattgatgtgatatattcagaattactctgaaagaaaagaagaaaatgttaaggagactgatacattcaaacaattttaggtttgtaacatggttgttagcgataaaatttgaagaagaattaagggtgagagaaaaagtaattggcctccagtaaacacctctcactgccagtacaaggcaaggagacaaggtcagcattcatatttcataagcctagtaataacaccactgtaatctgcacagctactttggatgtgagatgatattctatttctgggggagtcagcttttctttatgtacagtatctctcttttcccatttaaaaattatttccattcattaaaaaagagataaaagaattacaaaactacctcccttgttcccagaactctctattgacatgattgtttatttctctttctgcctttaatgtctttataagtatttatttaacttatttgagaatatattgtctatgttttatcctgttttattctctttacatatttctatgctaacattcctcattgtaaacagcctttttgcagatgtttaccttaaatatcaaacaccaaatatcaaagtttactaaacttttcctcccattgttaaatatctagattaattccaaattttcttcattaaacatacattgccgtgaatattttctatctaatcagtttctttattttagattacattcttagaatatattcccagaagtagaattagagactccaaggatttgaatcttttaaaaagtgtttttaatacatggttccaaatctcataccaaatggaatacattgattttcatatttaatatctaaatttgtgaaatattctgctgaattaactttgatttttttcccgtcagtctttaattaaaagttgctgtctctctcagttacaggactagctaccagatttgaactgactgccagtcattctgggtaaaagcgtcaggtttttcttaactctgttgagtatatatcctattcaaaaaactgagttttttgtggggcaaataattagcatgaaatgcaagttggctctcttcatccttctcgttaaatcttgcataccatcttaaaatacttgaacttttctttttaatccataataggcaaaataaatactcaaattagcaaacaaaaatcaaaataacagtctttataaaagaatagtatttcaccatgattaacattttcatgtgtggtgcacacttatacaaaatgagtttttgaaaattttattattcccctgcagccctccagcccagaataatcaccattctactctctacttctcttcagcttttttagatttcacgtataagtaagatcataaaatatttgtctttctgtgtttggcttatttcactcagcataatgtcctccaaggtcatccatattgttacaaatggcagaatcttcttctttttaaaagctgaatagtactttagtgtgtgtgtatgtgtgtgtgtgtgtgcgcataaaatagaaccacactttcatgactcattcatccatcagtggacagttggatcatttccatatcttggttattgtgaataatgttacagtgaacatgtgggtacagcaatttcttccagatggtgatttcattttctttggatatatacccagaagtgagattgctggacaacatggtagttctattttcaatttttaggagcactcatactgctttttcataatggctataccagttctccccaccaacgatagacaagggttcctttttcttcacattctcaccaacacttgttgcctcttgtctttttcatgatagccatcctaacagttttgagatgatactgtggttttgatttgcatatctctgctgactagtgatgttgcacatcttttcctatatctgttgatcacttgtatgtattctttggaaaaaaatgtctgttcaggttctttgctcattttttaattgagttatttggtttttttttttctaatgacttgtgtcagtttttaaaatgtattagatattaatccttcatcagatatatggtttgcatatatattctcttattttatagcttatcttttcatttcattgattgtttgctgtgaaaaaaaatccatcattaaggggaaataaacaagggtgatttttttctcactttgtgttgatttttttttgagacataatttgagttgtacatcactaattagaattgagataaaaagatggaagaaagccacttccacagcacgttttatatgaactcgcaggaagcagaagtatgcagaagttagaagaggcaccttgagctcaaaatgaaaaaattctgtcttttaaacatcactgcttgtcttcatcagaaaccaaatgtgacttcttggtagggatgttgtaaaggggtttaccattggtgggtagatgaattccatgaatttaaaattgcttttcacctttgaaatttagtgagttcattacagctgggaggcagacctatgggattcataaatggctgagaagaaaaggacatgagattactaggagaaaatacactctgatggaagagagagtcactcccaaccgttggctcaggagtaagctttagttgtcgatgaagaggagtggtttagagaattgcctgttgcctgtcactcaatgttgcctcaacccaggtattcatatggcactgtgggggttcttgagaaagcataagcaaaaacttacagaatttttttcggtaaaatcctgtaagccattaaggtacacagtgtattatgcagtaaatttaggtcacccatttcatggcccacagctcagtttgggaagcttgtagactccagatgagactccagggcatcaacaagaaagcatgatgaaagcattgaccaagaaaggtggaaacatattgagtagcaggaaccaaagcccatttgaaaaggaaatgccattagacactggtggttctcagtggaaacacaaagatgccttgagaagaagagtctggcctagtgacaagtgaggagtactgaattcagctggaaaaagaattctcttttttaggcaaactccataccacttgaggcaaagagccaacatgtattccctacaatctgagctgtaactcagtttgcttttgttttttcaaacagttaaaaagagacttggctggtactttcaaaggggaaattgagataactaacaattttggagaaggaatattgcattttcaggttcatttactatgaatgcctaccaaagcaattacagacaaacctttctttctttcctagaagataataaaaatgataattagcaatctgctccttcatttcttcacatgttcttgaccttgccttgctatttagggcttaccatatacagatgatttttagaaagaatatgatttaatttcttttagaaattaaatttctaacatttagaagcttcgttttcttaaatataaatgttttttcaaatggtctcaaatggtctctaagcaaaaaataggacaatagaaaagacctctgttgctactgtttcttacattctgggaagttatataagctgaatatgtgtgaattgaatgatatatctttaaaatatttattggttaggtataagttataaatcacccataatagtttagttaaatttattttacttttatgattatatacagggcaaactagagactttgaggtgtgaaaaaccttcaggtaaattctcactccacggtgtacaggctaagcctcagcttgaaagttgtgataatctaacaaagagttcttgtgaaggttaaatagaatgaagactagaaaacatcttgtacaaaactctctgatttcaagtagccttcattgtgagtataaagctgagacaaatgaccttgaaaactatatatgaataagggctaaagtgtcagtccaggctgtagttgcttgagaaggacaagaaaataaggcagccatcagagcagtgaggacatattgaaaaaggagaggcatatgctagaacttggaggaggatagggatgtagtaggtcatctctgagcccctacataagtcctgaagtctctatttgatgcttagaatgaccattaccctgaaatcttacaattagcctcttagtttcttcctagggaacatttaatgattactggctccattaagtgttgcattaagccagaaattcagtgaaaccatattaatcacataaacgtaaaaaccagaattagcctctgagctactttgttcctcagtgtccccattgcatatacttggcaagtccacccaaacctatctctttaatatccatgggatccgtccatttctctccatgttaacttccatgactacatttaatactacctttttgtaggttgaattatttcagcagtttcaattgccatccttgcttccgctgcagtgcattgttcatacaaacagcagctagatcattctaacttgcatctgatctgctaaaatcctttcagtgggtctttagaatctttgtcctttggcaataaggaggaagcagtagaacaagcttgtgtctgttctaaacagtgactatgctgctttgggtaggaatcactggatttatagttggcctatactgaacttttggttctatgtgtctaaggggtactcatcttacatatgaaaaatgatctttccagttgaaaaatgatgttatgtataaacctgtggaaaaacatgagagtgtcctaaactcgggtatcaacaataagcctagtaaaatggtatcaagtttaaaggtctagatggtagatggttatttaatgagaggtaaggatggagtatgatttagatttataggtagacaattgggggtataatgtcgttaaataagatagggaaaagaatatgctgaactttgctaagagggaaaattaataaatttaatttgaacatattgtgtctgggatatctctacctccagatagaggggcttggttgtaggctattgttgcaaactatatggagctggtgagagggatccaagctggaggcagatttggaagagatcaggacattggtgatgtgagaaggaacagatgggaatgggtggaaatctaagcacggccaagtaagaaagaagtggactggagatagagctgccatctattgtccacactgtgcattcacctcctactatgaccctagtgcttctgcctatgtcctcccttaggatattttcagcaccgcaacaagagcaaaccttttaacatagaagttaggtcacctcactcccctgtctgaaacctgccaagggctccctgttacactcaggtcaaaagtcaacatactttcaaggttccgcaggccctccatgacctgccagccccttccccatgggctttctggtctcttattttaaactctcctggccccttcattccatggtcccttcgttccattcccaagtgttatctggcttacttatctgccaatataccggggagcctcttgccttagcccttctcagtggcaaggctattctctctaaaatattattttcccagaaagtaccatgtctttctctctttcctctctcagatctgtgcttaaaggttgaccatgcatcaagtgttggttgaccatattttagtaactcaattctctaaccaccaaaaatgggactttttagttctatgttctgctttatcttactccatagctgatattattaatatttttatcctgcatatttcattatttatttgcgcattgtctctcccaatcaaagtgttagcttaatgagggtaaggattgtgtctcttctgttcactgctgtgttcatgacaccccaaacactgcctggcacataacataggagccgctcagtgaatgattgctgaaggactgaatcaagatggggatgaatgaaatccgaagagatccagtgtcttaagtcataggcagcagagagagggttcatttgaatgctatgggtgagataagcatatgtcaagaaatatcttggcaggagttgacataactctgattgctttctctaaaaaaattagggttttttttgtttgtttttttgtgttttattagcaatctaaaagtctctagagtgagcttgccaggttctggagtcctgttcctcatgtactaacacacactgatgtgtgaatggtaggcttgtgtgaacctgttcaggtcagcagtatccttcccttgctctgatcattttagactcaataaaaaaatcagtttagcagcacaacttcccaggttttcttggtgtttgtgttttccctcagatacattgtaaaaggctttattgcaggggcaaagtactttccttcttctcataccttccagtgctaagcacctaaataaagagcaattgaaattttattaattaaatattaattgcatttttctgatatttcaatgaaaacttctaagaaaaggtgattatatttctatattttggcaagaacactggaaccgaagtcaggaaatataaactggagtctcctgtcacctactttttaagtgagtgactttcgaagagttacaaatttctttgtgcctcagtttcctcctatattaattgtaataattatcagtcctgccttaaatcacactagtatggaatttaacaaggtaatttaaaaattattttctataacataaaactttatgaatttcatttatataactgtctgtggagaaactacttttccctaggatttctttgtagatcctctgaatcagacaattctaggtcttagtatgtgaaatgcacatattttagatagtcgacttatttaaaatgttattctgtttctggatttgcattcttttgccttccaatttgatttgtctgatatgttgtgaagagtatatgactaaatgattataaggtatttctggagttattaaacggtgcttcttgtctcaatggaaataacagtttcattttgtagcttatccattttgactagaagaaagcccagaagtgaatcagggtgtgtctatattttgtacctcctaattgattttcaaaatgatataagtgaaacagaagcgaagggaagattgaaatttacaagctgtgtaaatatttccccatagaaataagcttatgaactttagaagagggtgagggagagatgcattttagaggcatgaccaaaatgaatactgaaagatcagacccacatggactgaatcattagcttggagatctcaggaaaatctggtgagtagaatcttctgagagaaggaactttggtagtagaaagtagggtgtaaatccactgatttcaagaagatgtaagagttttacctccacttggtaaggcatgtatatctgaagtcagtttctgtctgctatggactgacttgaggattgactactcaatcaacatatatctataaaatatcatgcactaggcaaattgtgggcactgtggtgaagaaagcttatgacagtagatctcacggggccctcaatctatttagaaaggtagtttccaggccaataatttaaatagtttttgagtgtagggcagaacactgtgggatactacaactttggccagtaaggacacctaacctggtttggaagctcaggaaagattatatcaaacccagtactaaacatttaatatcccaaattccagggtttacacaacctcatacacagtcatactacttatgagaccagtgctttcatttgcatgcagtcaagctatggaatgttgttcagtcactacacttcatgcttttgaactaatgtagtggggtgtactttaaaggaggcagacggcctggacaacagctgtgtataaggtaatctttgaatgtcatctgttaaatggaaaaaaaatgccactcttacttctcagtttgctctgaatatgcactgaaatactgcctgtagaagatgaaccaaagctgacacttattaatgttaggtctgattttctgagccattgattgtgacattatagtaagctcttgtctgtggatttggtttgtggtcttgattcaccttgcagaagggacgggtttctataactctgtgcccttcatgaatgatcagtcagatgccttctaatggggcactcattgagtactgtcttgtgtttgcagcctgaatgttcttgtgttgggaagagccataccagaatctttcagataaagcaatgggacacattgtcatgtatcacactgttatcaacacatctataagtggcccttttcctcagcatagcattttttttcctgggtattatggatgagtttcccatgctgtggtgtagccaaagttgtcctattaaggaaagtcacagcactttggatggtaaggcatgataatgcaattctgaaggggattcttaatgtacggatgatcaaaaggtgaccctaagggcaaattgataattgtgggaagcccagtgcttcccaccagtgtacagagataggttaatttatatttccccacaggtgtttgtctgatagactaatgatgttaagcagaataacaaaatctgcatttaaatgaatgtattataatgtggaaaagtaagcccaaatacaaagtaagcgccatcacgtttgggataaaaacaaagtacagtatcattagagtcctctgggaaaacgtttgtctgtgatttatggtcttattttggagcggctcttatagaccctcctggaacccagctaatgaataaatgataattctacccctctatacatcacacttttttttacttttttttttgttactacagcataaacacacattcccattagattaatgtttctaataaattaggaaaaatgctaagtaagaaagaaagggaaccaaaatggaaaattcagtgaagtacagactctatgggccaagagataatttacttttattagttttttctttaagaccatagtgaaagtaatgatctagctatttttattttaaatattgcacagataattttggaatcgaaagtggaaccaattatttaaagtcctaccctcgtcttccctgagacttaaatagaaacagtagggaaatgcaaagtatttaactggtatgaaactgagagcaactaatcagaaagaatgtcaggcataatacaagagtagaaagaatcctagctgttcactgatgtgccatgtgttaactctttagtctttgaatagcgggaagatctgaggacctagagaaagggccagagtagccacaggggtggtcatgtggcatccagagaacctgtagctatttaccaactgattgagaagtatttcagtgttttaacaactggtatcactgtacatgccagtggactgtgagccctgaagagatagaccattgagttctattttcttgtcaaattgggccacaggaagtctcaggctcattgagatctagttagggctctgtcactcactagctgttgacgtttgtgtaagtcagtgcacaatcaccccagtccctttctccccctttgcagtgatatggagctactactacctacttggtaaggctggtagatgcatatgactagataattgcatgggatactgcaatgcaaagtctgaagcatgatacctgtctaactgtggagaacccctgattttgctttgtccgggattctttttccaacctcactttgaagaacccctgaaggcactgaacatctagatatcctacatcctgtggccaaggggcaggcagaaaacctaagctcatgcaaatttatactatctcctaacaattgtatttttaagaagagtgctacaaggatttttaatggttaaaatttatttatcttgagacaagtgccattaagagactgtgcaagggccaggcgcgtggctcacgcctgtaatcccagcactttgggaggccgaggcaggcggaccacaatgtcaggagactgagaccatcctggctaacacggaaaaaccccttctctactaaaaatgcaaaaaaactagcgaggcatggtggcacgtgcctgtaaccccagctactcgggagactgaggcaagagaatcacttgaacgtgggaggcagaggttgcagtgagtcgagattgcgccactgcactccagcctaagccatagagcgagactctgtctcaaacaaagaacaacaacaaaacaagagactttgcgaggaatgttgcaagctgtcccagtgctgccttgatgcctcttcagacaaggtactccaacttttcctttgattccttataagtaatttcttccaacaagttactcttttgcttaaatctgacacatcaagttttgttgcctgcagtcacagaaactttttgtagagaagtggccccttagttttcaaagaaacacaaatgccactgcttggggctttcctctatctgcttggaatttcttcttccttccctctctcccttcctccttttcctctcttactccctcttttcctgcctacctacctttcctctttctgtctcctgtctttctgttttcaattgtgatatgtagaatcaattctgcatcttctaaataaatcagctgtggagcaggcttccagtttcatggaatttacatgtttgaggaacagatttgagaaagcagtctaacaattttttatgcattacactataaaccaggaaatgtatccagaatgaactagttactcacataaattaattcttaggtaaagctcacatgctatggaatggtttacctgactgaatgatgtctattcctaaggaagtaattttcctgattgtagctgtgatcacgtctcagggttttcacacagcatctcaggtggttctgtctcctgaccaatttcactgcctttgtgtgattatcagtgaagttacacagcagtacaggtaagatatgctgtaaggactgctgttcatgtcaaaatgtaatcgtgaggtgaaaattgtgttcagaacaatgctgtcccaggcctattaaggacaaaggagaatgaaagagcaatgtgctgtcataaaaccttgtataatgatttcaagccatgctgggccctgacagctgagggaggaacaggaattgagttgggaccatgcttcctaaacttatgcagctaatttagtagtagggatgttgtctctcccatgatgggttcgcagtgtaaagctccatgcctgagggagttggtacaatgtgggcatgggttgatttctagcagtacaataaagagagagaagtgaggtgagaagaggaagcttatgggcatgttaggccctgcctgggaggttttggaaataaaaaaataaaaacttcattctgagaaggaaaagagtaatacaagccttggtgcaggctttgcctccaagcctgaagggaacaggtgtgaaaaacctatatccagtccactagaatagccctgcaatgaagacacaaagcctgtagctggagtgtgtctgtggatgccacatctgactctgctaaacacagcagacccaagggtgggaggccactgaccatcctatctcagtgtctgacctggcagttttgagcctctgggtggctactgggacaggctggagaaggtagtgacctcaggtgcagtatttgggactaggtttctgaaagctacttgtgtattctagaaacatgcctgtttctcctctgtgcagaaaatagcccctaaggaaggggaacatatacatagagaagtagtgactgtttgaattaatcaatttatttattatttgtctgtttctctgctgactgcagacagaaaaaataaaatacagtggaagatcagataagggcaactcacactgtgacaaaggattttactatggaaaacattgtcaaatcatggtaccttgcctatccaatagcatttctctaataaaatattttctcaagaaggttattttgcaccaattaaacataaggctttgtcattaaatgttccaaagtttaaattgagttcctgtgggttgtatgtgcatttagtagtctgactgctttcccacaagaaatcaatatttctctaagatttgtgggaatatactattcattccaatagagacgattaaaatgttaacatgtaacaaactgcaaatctggcatggaatgcattgttttcatacatgcgtttagaacagaaactcagattggccattgtttatggggagttagagtatatcagacatgacaaatgtgttattctccccagataaatgtattttagcctgttgacaccaaaatgctcagggacctcaagttaagactgaaggtgaaaaagaaatacaatggtggaagttaaaacatcaccatcctaaaaacaactgtagtaaaattaaaattctgaaaataggcaacagcaatgaaaacaccaaaaatccagagacaatcaatatccaaaataataactacaaaccattgaaagcaaatcctcaaaagtatgtttgaggttcatggaaaagactactttttagactccacaaaggttggtggacttgaagttgtgcacagatctgcatttagtgttgtttgccacttcttccttaaattttctgctgacttgaattcaaagcatagactttatcgttcagactggtttttgtttttctagatcaactgttgaaccaagtgggatgctggaacgataagcataaactggaactcttccaggcaaatcagtataatagtcaccctaatgatgacccattcctgggtccttctctcatgaccattccttgtcagtctccctgcctgtgaatttcactttcgtccacacttcaaatgtagagtttatcaggggttccatttttcttcatctttgggagtgacagagttttcctagtgatcttatacacttacaacttaactccctaccttgtttctcatgacattcaaagacataactttatctcttaatctatagacccacatgtttactaattactatcacagagttttccataaatagctccaggtgaacattcctaaacccaaactcattctccatatcccccaaactcccctccctcctctgtcttctgtcttggttttcaccgtctaactagttttcttctccttgccatacttctactctgcaatcaatgacaacagaaacagacttttcttattttattttaagttcaggggtacatgttcaggtttgttatgtaggtagactcatgttgtaggggtttgttatacagattgttttgttacccaggtgtgaaaagtgttgacttagagcatattttgagaaaattattatgcaaaaagtatctaggtctacattttctgatgtgagttacattacaagagaacctcttcagtaaccacagcttgctataatttcatgttagaaaaagcaccatattacaaggataagacatgggcacaagccagtcagaatgcatgcctcaacaaatcaccataaagcctggccctaaacaatcagtaagcacttatgatgtataacagctaaatatcatttttgaaattaagtaagactcatggctcagaaggggaactaggggagtggcaagactccaggacaccactgtgttcccccactaactggttcttccatttttgtcactgatttacatgtgataaaatacacataggattattgaattcctgactgcataattacgactggtattttcaaagccaacagaataaaagtgttcaacctgacctataggatccattatggtcaacctcctgtcacctttcttagctcatatgctgacactctccacaacctctgtccctaccattctgtactgtgcatttgcttttcctccaacagaagaaaatgggccccatttttccggggcctttctactcctgttttctcgcagacaaggttacttctccctgcacttccctccctgtgctgcttaccaactacccctgaccaagtatcccctttgtgatctagtggattctaactcatccttcaagtctcagctcaaatataccattttcagtgaaatatttatttataccaaactcctccatacctctagaagattaatcatttgcttcccttggtctctgtacatccctctctgctagccctcaacataccacattccaatgatatctatttcacacactatccccagagactgagcttccagaggcagatactaatcttatcattgtttccatcgtgcatctagttaggtctcaatgggtatttgttagataaatttcaaattcccacaagtgtgatgctgacaggtcataagcgcaggccccttccatggaagaagggctctgctggtgaaacatggaccatccctgtgcagacattcagcagaaagtctatgcacactctttcttattttgatggtttcagtccaggtcttgccaggcaacagatgatattcccagatggtacttttggagagactttcccatagggattatttacccaagtatggatagagttaaaagaaccatcaagaaatgctactccattagaacggaaggaacaaggggcagaatggttatacccaaggtccagttgagaataggagtcatgaaagagagatataagatgaagtaggctaaggatattgagttctcttcccttttatctccgtatccttgatcctttcttttttctttctgctacttccctttcaccatttgccaccagaagctgccagagggcaaggaaatccaggcaatgcatcccattgagatcggctccttgggtacagagcagggtggaaaagaacagaaaataaataaagggtaaagacaggacagggacctaaacaggattgttcaatcttgaatgcctggcacttccaagaggcccaggacacatagaaaagaaatatttattacatgagtgaatggatataagtaggagcaagtctcctgaccctcacttattccaaagactttttcatttcaacatttctgcatgttagcctgttgcaaaaccacaaatctgctgccaaaaggtaaggctggatgtttggttctcttatgaacaggagaagactggcctataactgtggacacaagggaaagcattttctgacattcagatcatttggaagcatataaaagttaaatctgttctacattgtgttggaaagaaagaaaaaataaacaaacaaacaagcacaacaacaacaaatcacagagaggaaggaaaaaaaagaaaactgatgtgctgtgtccccaatttgtgcacgattctctgcagtggttcaagtttatcccagcttatcacttaaaatcaatgacctattttcttacccttgcctacgtattctctgtatgatgcactttgaaaagtgttgctcctcacacaaacaatatcaaaagccacctgggtgagttgtcactccttgttactcatccccgctgggcaccttcgggaaatgagggtgaatttgaggaggattcagagctggtgaacaagtcccacagagatgtggtggggaagagtggcaccagatagcacagaagctggccattttatttctcatcaaaagagcaggaaataatatagtcaataagaagcaggaaggagccaggggattttgtgaataaacaccagagtcactggaagaaaggacagaacaaatccttcacgtagccttggatgtccttgttctgccctgtagtgaacaagggaaaggggaagagtgtgatgaatagatcatgtcaggaaactatcagacacctcagcttctctcgtgtctactttatctcccagtttagagaaaaaaaaaaaagatttccttcaacttttcattgtaagctattgtttgggcttataacaggcatattcaaattgcagatggaaatgatttcagaaactgtattgttctttttgttatttattgtttcatttttaagaccagaaaaagcacacctcttagagagtgtgcctatattctccaatgaatatcgaagataattttctggtatattttctgataaataaaacaatataataaggtagttgctgatatgtgcatgcaaagctgaagtttattgttcttacttttctacattttgagcttattataaaatctatgaaactttcaaatatgtgtaaatatataaaatatacatatatagactatatatataatgaatatacatatacacattccatacacgtataatttatttttatttatcttttatttttttttattttttgagatggagtttcactctgttgcccaggctggagtgcagtggtgtgatcttggctcattgcaacctctgcctcctgggttcaagtgattctcctacctcagcctcccaagtagctgagattataggcatatgccaccacgcttggctaatttttgtatttttagtagagatggggtctcaccatgttggccaaactggtcttgaactcctggccttggcctcccaaagtgctggaattacaggtatgggccaccgcgccctgccatacatgtatattttaaaggttaataacaaaaccccaacctgcccaaggcctacttaaagtacgctctcagtaagtttcagcacttttatgtcactccttcattgcatgctattctgatctccgccagagtgaattttcggtagatttttttccttgcttctctttttagctttatcatatatgtaagtataagaaacatttaattttatagttttgtgtttttttgactcctatataaatgaaactgtagtatattcctttgtaaacttgtccttttagttcaatatcatttttttaaaattcattcacaaagataccaataattgtatttcttcattatcactattttataatattccactgcatgggtatgccacatattttttcctttttattttaatttctgggatacatgtgcaggacgtgcaggtttgttacataggtaaatgtgtgccatggtggtttgctgcacctatcaaccggtcacctagatgttaagcccagcatgcattagctatctatcctgatgctctccctcctcccacaaccctcgacatgccccagtgtgtgttgttcccctccctatgtccatatgttctcattgttcagctctcacttgtaagtgagaacatgcagtatttgattttctgtttctgcattagtttgctgaggataatggcttccagctccaaccacatccctgcaaaggacatgacttcattcctttttatggctgcatagtatttcaaggtgtacatgtaccacattttctttatccaatctatcattgatgggcatttaggttgactccatgtctttgctattgtgaataatgctgcactgaatatatgcgtgcatgtatctgtataacagaataatttatattcctatgggtttatacaataataggattcctgggtcaaatgttatttctgctctttaaggagtctccacactgtctttccaatggttgaactgacttacattcccatcaagagcgtaaaaagcattttattttcctggccaacatggcgaaaccctgtttctataaaaacacaaaaattagctgggtgtggtggcacacacctgtagtcccagctaattgggagactgaagcaggagaatcacttgaacccagaaggtggaggttgcagtgggccgaaattgagccactgcactccagcctgggcaatagaatgagactctgtctcaaaacaaaaaagtaaaataaaataaaaatagttttcctatttctccacagccttgccagcatctgtggtttcttgactttttaataatcatcattctgactggcatgagatgagatggcatctcattgtggttttgatttgaatttccctaatcatcaataatgttgacctttttttcatatgtttgttggccgcatgtctgtcttcttttgagaagtgtctgttcatgtcctttgcccactttttaaatgaggttgtttgttttttcctgtaatttgtttaagttccttgtagattctggatattagacctttgttaaatggacagatggcaaaattatttttcccattctgtaggttgtctcttcactctgataataatttcttttgctgtgcagaatctctttagtttaacaggctccatttgtaaatttttgcccttgttgcaattgcttttgacatttctgtcatgaagtctttgcccatctatgtcttgaatggtattgcctagattttcttctagggtttttgtagttttgagttttaaatgtaagcctttaatccatcttcagttaatttttgtatgaggtgtgaggaagatgtccagtttcaattttctgcatgtggctagccagttctcctagcaccaattataaatagggactattttccctattgcttgttttcatcaggtttgtcaaagatcaaatcgttgtagatgtgcggtcttgtgtctgagatttatattctgttccattggtctatctgtctgtttctgtaccagtactatgctggttttttttgtttgttgtttgtttgtttttgtttttgtttttacagtagccttgtatagcttgaagttgggtagtttgatacctccagttttattctttttgctgaggcataccttggctataagggctctttttcgtttccatatgaattttaaagtagttttttctaattatgtgaagaacttcaatggtagtttaatgggaatagcattatatctataaattactttgggtagtatggccattttcacaaggatatggcacaaattgttgatatattctagtggatacttgtgttgtttccagttttgttattgtttttctttttgccgtgttaaatgagaccactagaatataaccactggatcacagaatgttcatctatgtcttcctaaggtaatgccaagttgttttccaaagataataatacaagcttccactctagctgccagggtgtgagggcctctgctgctccacatatgctaatatgaggcagcacatgggattgtcagactccctgatttttgctagtctgttggagatttagtggtatctcaatgtgattttatttatatttacttgaaaactatatgatgtaagtttccagttgtgtctaatttcaaaagaaaaaaacaaacaatgtaacagaacaaaacaaaagcaaacaatataacaaccaaatggcaacaacaacacgcacaaaataaacacccaaggaaccttatttaaattatcattcttgagccaatgagtaatttactgtttttgttttaatgtatgctctatcttcatctgttaggagattacctcactatacagacagattctccatacagatcaacctaacagtaagaaatgtgtgtgtttggcacagtgccttgggaagaagagctgctatgtgtcattgatgactctattgtttcaccagttttcctttagttactatacaaatgggaacaaggatgggaattagggaaattttccaagtgtaagaagctttcagatcttctcacatcacttattggatatgcagtgacacattagacctttattttgtataaaagttgtctgttccttctcttgcttctccttcttccaaattgttgacctgcatacaacatcaataacaaacccattaaacaatttttaagccaatttagtagccaccacttccaggtcactaccaccataccattttgaaagtggctccacacagggcttcttctggaagtttatagtatccccattcagggccaactgtgcaccttctgcagaatgagatggggttccccaacttttgtgtatgttttttaatcctctcttattctgggatgttaggccctgaaaggacacaggaacagggctgatcatgcgtgctttcagggcccaaacatccaagacagtttgtaccaggataaccccaatagttgttaaaatattgaagcattcccatgcaggttggtcaataagcaattgtctcagaacttgtatggccaatcacaatgggaagcctctaagactcttttgtagcagcatagattggtgtctattttgaatggttggaacattgtgtgtgtgtgtgtgtgtatgtgtgtgtatgtgcatgcacctgagttagtggaagtaaagtaaggggaagagaggaggcaatgaggtttgtctatgacattctcactctcccaggttgcttcttttctttacaaaatccagagcagaccactttcaattttgctttacttccctttccatctatctaggacttactgcagcagacctccaggttttgtatctttactttctcccaagatcagcctcatgaccagactttgatggttggtggagtaataaggggagtccaatcaaccaatatactaagtataaggaactgaactgggagccatttcaaaaatgtatctatcatccacacacacacaaataatgcataatgaccttttgggtagattttaatgaaggaaaatgtaaatcctcaatgcaggttgcaaaaaatgaggatgtcaaagtaacccataataatgcctcttgtattattcatggtctttgatgaaagattttttaataaacaatttcacctttatcaaccaaatttaattacatttgtaccaggataattctttacttgtttggcttagaaatgacaaagcttctttccagattcattatgtatttttaggatttttcaagaaatcaggaagtaagagttattttcaaatgcttttacaagggtgaccaagaggccagtgttactggaaaggaaaaatatatgatgtcaaactcaacccactgaatgccaaaaataagaaggtattcattactgaacccagttttattggcagggaaaaatgcaattgaaaataccaatcaccagtaaagcatatatgaaacaatgctctttcgtagtcattttgcatttaacaagtttttaatttttttaaaaaaatgggaatacataagatgcttcctatgcaaataaatttcatgaatttcagtgaaaatactttgttttcatcccaggttcaccacactctttctatctgacagatttttttttcaacagaatatgggagtgattttgtccagttattcttctaggtctccgtggaaatttctttcttttatagataccatctggcctaatgagattctaacagttctatacacactctgtctttctttgtatttgcattttttcactggagtcattgctggtagtgaaatggaaaaataaggggaaaaaagtatgtatgttaaataagcatggcagttttctctgtcatttaagaaaagtaattacaattattcgtttgatttactgaatgtaagtattcagtttgaacactgtccaaaggatgttgccttacttaaatatccagtgatcctaaactaaaattgcggctgtagtcactgatgggtttagtctaggaatatataatcttgtgtgtcttcaaaatgttaggaagaaatcttcttaagcaggatttcattatgtgttttcaatcactaatcttcactccttgtctctctctctctctcaccccgcccccccgtgtgtgtttgtgtgtgtgtgtgtgtgtgtgtgcatgtgtgtgtgtgtgtgtgtgtgtgtctgtatgtttctgtctgtagaattaggtggagggttggtaagaataaatacaatcctacactgagatgtagaggtagcaagccaaatttgaggtaattatgctaggactcacattgttagcttccttgttcaccaaatgtacaaatttagctcataatcaatatttttaatgcaaaagtttatataaggtccatactgggtaaggaaaagaaaaaataacattaaacagggacttacatcctgacaacttttgtctcatgcatcagggactctgtcctatgggatagatctacgcgtatttggggaaacacattggccagtggtccaaagtggagggtagctctgggataagaaaggctttagattcatttttcaactcttacatttactgttgacataggacatgtttcttaaactttactagcctgtaaaatcagtggagtagacaagaggagataaagtacctaaaagtgtacctagcacataggaaacaataaaaattatccaattgtgttttaagaacctattttgactatacagctatgtactttgaagtcaaagttgtttacatgtgagaaaggaaatggaccaacagaataattatagatggcaacatcctttgcctaatgaatcatttgttaaaatacattcatctaccatgtgtcagaggctggtgctgaggctatgtaagttaccaaaggaggcgaaatccatgctaccgtggagctttcaatctaacaattaatgataagcagatcacaacatggcagaatagtagatacattagaaaaaagtgtctgctcccccctacacacatattagtcatttgtaaatgtttagaatgataaacattaaaagttacattttctttaaaaatattttatttggccttacacatggaagtaattttctctggctaggcttgtatttttattatgatatgtgaagcagttaacataactcatattaacactggctggaggttttatcttcaagggcagctggtgacagggccattaaggtccacagagagaggtggaaggaagggtggtctgaatgggcaatttctcatttgttggattgatccttgattttatcagcatgctcacgttcaaaaaatcccattgtgaggtataatagatgacacctgatactaaaaatctacctaccagcctgaacagttcagaaattaatgcctctcataacaccaagagatttgataatgaagccagctcagtagaggtcaaggggaaatgatattatgtgtgttcccctatgaatcaatgtaatcctattgcatttccccagatgttcacccctggcctgtgcagctacaatgtgatctcaaagactttcataggaatcctactaaacaattttgtctaaacttgaggcactgaaaaactgtgtatggtgtaacaggtggagtttacatggcaggttcctttgtccctggagatctgatcaaatggatcctcatcccatgctccttgattgtccggagtacttccaagtgttcagagagttcttaggagaatctatagtctcatggtcacttttggttctactttatcctctaaatttgagttaccttgccattctgtgaaaggtttctctgttcttcattgccttgacccagatgtgaaatttcatcacctgctcaatttccacacctcccaaccaaccttaaaagtcatttgaatatagcagattgttctgaaaatttagcaatgtaggcgttatggggtggaggtaagggcagagccttatgtgatgacaacacaaacaccatcacatttatttaaaccatgactttctttaaattccctttccctttccttcataggaacactccaccagcagcttcttcagtttatgtcctcagtacccagcctggtcccatctctcttctgggctctgttttgtgtattcaagcatatcagtatgctttgaagaacaaaaggaccttgcttaacacaatcctcctgctcagaagaaatatgtggttttaaataattttgttattattttaacatggcaaaaattcttgggcatgctggagtgtcaggtccatgggggagaaagatgagttgaagctggacaggtaagacgcaaccaaactggggaagaattagtggcttggtgaagtctttgaagtttatacagttgaaaacatgtagtcaatgaagaagtttaagggcagtgaaaccatgattaaagctttgtttttgaaagtgactataaatgagacttgtagggaggcaacagaaattttggaagaaaaatgtttagggctttgcctgaactaaaatagtagtagtttaaatgaatatgatgggatgtgtgctatggtagatcatttttcctgtgctatgggggtaagtgttagcttctttctcctggactagtgtgttagattcttgagaagatggattgtctaattcacttacaaatttcccagaagctgtcctagggcttccatctagtatgagccctgtaaatgttatttcagtgtatggaataagatgattttctgtccacatccattaagggcagctttagtcaaaattaatacatggatatggttgttaaaaaggatttttccacattgaaatttaaatggatccaaatcttctagtctcctggggcttcactttttacccagtaagatgatgggagtcactatccctggaaatagaaggttctagctgctctactcacacacatacacacaaaaccctcagtaatcatttttacctggtattttcgtaggagggtaaaaagatgacatttttaaagctcttttctctcatctcaaccagcttctctcatctcagcttgtctgtctgtataacttgcccctggactgtggttctgagctcagcctcaggcctattggattggccagtctccaaaatcaaattctgtagcacattgtcccatagttttactgggtaaaggaagatgaagacaatgcaggaagagaacaactgactgtcgaacattattcttctcaaaatatattggtcattcccactctaggggaaaatttaaagtactttgggttacaatgaaatatcagtagcctctttttcccctaattaattctttccctgtcctttctggattctgaaaatccactggtgttcgggtataaactccgaaattgtttgtcttgcttatgagggcattctaattctctgtctaaacccctcttatctattttctacaggattgccagttaaaatacaagactccctgttaaaatttaatttcagataaaaaataatttttaagcataaggctgcagcatgggatatactcaatacaggtacacctcaaaagtattgcaagttcagttccagaccaccataataaatcaaatactgcaattaaagaaagtcacactcttttgatttatcagcacatataaaagttatatttatactatactgtcgtttattaaatgtgcaataacgttatgtgtacaaaaaataccttaattaaaacattttatttactaaaaatactaacaatcatctgagctttcagggagtcctaatctctttgctggtggaaggtcttgcctcgatgttgatggctggtgattcatcagggtggtggttgctgaaagttggggtgattacggacttttttttattttgagacagtctcgcactgtcgcccaggctgcagtgcagtggtgtgatctcggctcactgcaagccctgtctcccgggttcacgccattctcctgcctcagtctcccgagtagctgggaccacacgcgcccgccaccacgccctgctatttttttgtatttttagtagagaaggggtttcaccgtgttagccaggatggtctcaatctcctgacctcgtgatccgcccgccttggcctcccaaagtgctgggattacaggcatggccaccgtgcccggccagactgtggaaaatttttaagacaacaatgaaggtcgctacattgactgactcctcctttcgtgaaagatttctctgtagcatgtgacgccctttcgtaccatttttacccacaatagaacttctttaaaaattggggtcaatcctctcaaacccagcagctgctttatcaactaagtttatggaatatcctaaattctttgttgtcacttcaacaatggtcacagagtcttcaccagatgaagaaaccactttctttgttcatccataaaatgcaactcctcatctgttcaagttttatcaatgggattgcagacattcagtctcatcttcaggctctacccctaactctagttttgttgcagtttccaccatatctgcagttacttttccgctgaagtcttttttttttttttttttttttgagacagagtctctctctttagcccaggctggagtgcggtggtgcaatctctgctcactgcaacctccacccaccgggttcaagtgattctcctgcctcagcctcccaagtagctgggattacaggtgcccgccaccacacccagctgatttttgtatttttagtagagaaggggatttcaccatgttggccaggctggtcttgggctcctgacctcaggtgatccgcctgccccagcctctgaaagtgctgggattacaggcatgagccactgcgcctggcctccactgaagtcttgaggccctgactatcattgataagcgttagaatcaacttgcaccacaatatgtattgttttccaccttctaagtacgtggtttgtggtaccccaaaacaaccacaataataacatcaaaaatcgctgatcacagatcaccataacaggtataattttaattttaaaagttcgaaatatttcgagaaacaccaaaaggtgacatggaaaaaggaagtgtgcatatgttgtttgcaaaatggccacagtacacgtgctcaatacttggttgccacaaaccgtcaatttgtaaaaaatgcaatatctgcaaagtgaagtgcaatgaaaagaggtatgcctgtttactaaaaaaaaaaaaaagtcattgtttatctgaaattcaatttaacatggtttcctttatttctaatagctttattgagatataattcctgtcgtacaatttagcaatttgaaatgtacaatttaatagtttttagtaaaaacaaattcatatctccatggctacagtagacatttttgctactcagaaagacccctgtaggcctttgctattacctctcaatgccccatcccctgtcatccccagacataataaaacacaaatgtactttctctataaatgtgcatattttggacatgtcatataaatagaatcatgaactgtgtacacctttgtgacttgcttctttctcttagcatgaagtttcaaggttaatttctgttatagcatgtatcagtactttattatggagcaatattgcattgtatggatctactatatattatttatcatttcatcacttgatggacatttgagttatttcacattttggctattatgaataatgctgctatgagcatttgtatacaagagtttgtgcaaacatatgcttttatttctcttgggtatatatctaggagtagaattactgtactatatggtaactttaggtttagtagtttgaggaactgccaagttgttttccaaagtggctgcaccatttactttcccaccagcagtacttgagggttccaatttctctacatcttttctaataattgtcattgtttcttttttgattatggttttgatttgtatttctctgataggtaatgatggtaagcatattttaatgtccttaccggccaattttatatcttctttgggtgaatatcgattcatatccctcactctttttttaattgggttatttgccttttttcattattgaactgcaatggttatttatatatactatgtacaagttacctctcagacctatgacttgcaaaagtttctcccattctgtgggtagcattctgcacttttatttgccaaattgtatttgcttaattctataccaaaggacactcaccttacataactcaaaagtctccataaggtattttccaaacaaagaaggacttctctcactgaaaggaattttgctttcctcctggactttttggctccaagtgtggttgacttttaaaataagtttatttattttcctgattgaatttctctgtgttctcattagtcatccgattttcagcccttttctgttgaacccttttcatcaaaaacaggtactgagaaagaagatcttgttttcccttaaagttttcccttaaagttgttactgagttaaaatgtagagcctgaattgtgaagtggatgataagtggtcttcacaattaccctggaacatctccttgtacatatctaacaaacacactcttttctcgtaagaaccaaaacaagaggcacctttgtgattatctattcaagacaccttataaaatatatctcatttgtatcatctccaatagtaacccacgagccatctaatagcaatttcagaatgaataaaacaaaaaatagcaatatggttgtgacctgctttaaagatagtagtgtacttatattacaggaaaacaattgaatgggactacttaaagggtaatttatgtaaaaatatataccattatatgagatacatagtaggtgctgaataacgttagtttcataattgttttccttattcagtatttaaatttaaacccctaaaaataattcactggggtatcaaattatatgcctacatttgtaaactggaatcattcagtaactgcaaaatattaagtatctataaaaaggcctaggcattgtattagagacttaactcataatttttcatttatttaccataattctctgttagatatatataatcacttttaggttacatatatattcactgagttccagtaacatattcaaattcatataagtggtaatataaaatctgctcttcaaatatagagcagtctttcctgaaaactcatgttctttttaatatagaacatttcatttcaaatcctatatattttacaaatgtttctttttccagagatcttctctgatcactctgagtggaagtaatttgttctataatggacctccagagtaatttcactgggaccctcctatggtacttagcattttctacatttttatatttattggtttctcagtgttttcgctgtaattttatttcttctcccatcatctctccttctatattcacagtgatagatctttcactacaatgtgtttactaatatgttagaaagagccaataagtgatatgcagcagtgatccccaacctattcttatcatgacaaacatagacaattaaggcactgaaattctacttagattaaaggtggattagcttatctcgatcaataacaaaaaggatgggcttgaaaatttctaaaaagcataacaaatctaaaaagtttgtaaggaattatcattacaaaactgatgagagagagaggtacctaaaaaagtaagtagagcatagaagatgcttttactctggatagaagatgcttttactctggaaaaaaaaatccatctagccaaattttaactttgtttttctaactgcctaaaatgtgtgagaggtcaaactccagaacacatccaaaacttgagagtttaacaggaaatcctcctaacgttgagggggtatcccaaatgaataatcctggagaagagatttttaaaaatcagctttcgtattcatttcaaacccatattgacatcaattagaagttcacaaactatgaatttatgataacttttgagcagaccagagggactcctaggaaccttaaaacaaaaagaaacagtttgtaaagttgtatctttatcttaagcccaaaattattgctgcagattttttttctagggtgaggaacatcatgcaataatgataaagcatatcaaatataatcaaacctacagaaaatgaggtaaaatgagttagaaaccagaaaaaaacagacagcaagaaatagaactagaaagaatttcatatatgggaattatcagagacagatcataaaacagccatgattactacttttatgaaataaaaggtgaattgagaacatattccaaaaacagaaacctataaaaagtggcagatcaaattaaaaacttacaaaatacaacttgtagaaatcaagaatacaataactgataaataactaaatggatgaattaaatggcagattagatgtaactaaagagacagccaggaagaaagatcagggaaattatctggaaataagattgcagagaagaaaggataaaactatgcagtaaatttagttgactgggtggacacagtctaagttagcgagctatgaaatggaagcaaagccttctgattccctgttactttctgggtgttagaataaattgctttactttatacttcaatataatttgctataatcactaaaggaatataaataggtaaattaacttcagaaattatgtcacaaaaattgcaggataaaaaatgctgcataccttaaatatacacaataaaatttattttaaaaattaatgaaaatattaataaaaatagaatagtggataaaataataagaaaaattaaaattgaaagtacaaatttgaaaggagaacacagggtggttgaaaaaatgaaatgtatttacaatgaaattaaatgcaaattgattaaatgctctagttaaaaacagattatcagattgaacatgtatattctgtttataagatatatgtgttatttagatgtacctaaagcataaagataatgaaagaataaaaatgaaaatacgtacaaatagtaatcaaaagtacaaataataatcaaaagaaaggtgtagctataaatataacaaaaattgtcttttagccacaaagcattactggtgataaagaggttcattttataatcatgaaggtttgagtcctccaatcctaaatttatattcacctggtaacagttttaagatatataaagtaaaaactgataagaaagaaacaaatattgaccaaaattaaagaaactgagaaaacaaagagtaggaatgagttagaagaattgaacaataaaataccatacataccaaacaactgaaaaacacaaattacttttaggcatatttgtatccattatggaacattcacaaaatttgatcaagtgctaggtgtggtcatgtaaatttatatcaccattttggaaatgttggataatatctattgatagtatgtttgaagttacatactcctttgaaccagcaatctcacatcaagaaaaatactcttgagaatatcatgaaattgtcttttagggcatatattcaggaatgtttcataccaagactatttataatagctacaaactggaaatacccaaaatgctaccaataggagcatggataaaaaaactgtattgtattaccaaaaaaaaaattctatacaacaaatggagaaaatacaacatctacagatgtcaacttgaatgaatcatgccatcaaatcttgagtaaatcaagaaacattccaaatgatgcttaaaatgtaattccatgtatgtaaaattaaaaaaaaaaatattagtaaatataattgtttagaactgtgtacataaatagtaaactacaattttaaaaaatgtgcattacaatggtaaagatagtggctgtttgcacacagagtgggaaggaattatagagggcttctgacatgttggctgtgttctgtttttcagcctggatgatctaaacatgtatattttccacgctgttctctttgtaagttatatttgacaaataagaagatttttaaaaagccaatttgaaactattttagggttcataggtataaaagggagaagtagctttcagccaaaagggagtctccagttttacctgactgccttaagagccttggaggagtcaatgtttatcttctctaacccttccagggaggtcattatgctatctcctactttgtagtccccagatcaaggaaatttaaaatctcactctacttgatcttaatgagctcttttgtttctttacctccctctctccgtctctcctttctgtttacaaaaatgacaggttttatggtccctgtggtagcagttttatacagtcttataacaaattgtctcaacctagatgctattgacatttggactagataatgctttggtgtgtttgtagtgagggctgggggtgggggtggggctggcttatacattgttggatgttttgcagcatctctggtctctacccctagatgtctgtggcacaccctcctttcccccagccttccttcccacttgtgacaacaataatatctcaaaatattgctaaatttcacttaggggacaaaacagcactgggctaggaacaactgacctacagctatgggcaaaaggagtctttaacaactattgttggatcagtaggtatacattcaggcttcacatataggtgcaggtttaagcttggtaagagaggacatgaggaggtatagctaaatatatagaggtacgctatattgaagggaagttacatctgctggctctaaatggtgaaaattgagtggaagttttgatcagatgaatgacaacaggaaatttttaaaaagcccaatcattaaagtgatttgcaaatacattaaggtagggatctcccatcatggttagtattctagcagaagctgcattaattcaggaatattgaagacattatccctggatatttggacaattcagagttctggtttccaaggtctcctctactgtcaggaggatgacctttaaataaaagactcctggacttatcagggacagtgtcttgtaaaaagccagtgtctttctctgctgtctcggagacagagtttgctattaaggatttttcattgcttttttgattgcttgtggccttcaaacagtgttgagtaaaaatacattttcatttttccagcatttctgagccaggcaattgctatttagtttagaaaagaagattggcttttttctattagtgagtgtaaaaaaaaagtattgccagttgcagaaaaaaatccatagaaagactctctctcatcatcatcatgtatatttgactaaatgtttcctcttttttagggggagaccacatgacctggatgacctaggatagccctggttatccttctgcctcgcatcctgtctagtttagcacttgttctaggtttttcacttgtaataaaattgtcattaataaccatgacatttaaataatctggaatgcttttggtagactgcgactttgacttttagcttccaatatagtcttacctaagagcaagatttttaacatgcgcttagaagtcgcacatctttcttttcatgattctttccaaatgcatcatagctaaatctctctttgtaaggtagcaggcagatgtttgctgacataacaaagtcttctcaaatgcgactaaggactgctaactctgtggcttcaggtgtctgtggtagaggcatcgggcttgttgcccccagcaaccacttggtgtaccagccagttctatgacctgtgctaaacctgcctggtgcaggaagatacagtacagcaactgggagaggagttagagtaatacatggggcattactggttaggaatttgtagaatatgtgagggtaataaaagttcaggcttccagttgtagaatgcctagaatagtataaatgctatcactacagtggttgtgttatttattgtatggaataaatctacaactgtttatttagtttgttgtttggcaatgcttatttttaaataaacctttttagcagcagtagctcaaataaacagaagtgcatgcttagagaatttccagtagctaagaaagtcaatgataaacatgtacttgagcaaaatgtttctctacatttagcatcctccatgggaactgtagtgaaatcactgaccacacaaaagccagaagacctaaatctgctaaagaaacaccagcatctacttaaaaaaatcacttgttattttaggaaactgtgcctaaggatgacaaattaatacagctctgaagtgtgactatcaaataatagttcttttaaattaacttcactcattttctattgcaagtattgttatccatatacaaaaaaaaagtcaaactgaagtagttgcaaatgtcttggatttattaacagatatctttgcaaacagttaaatgatgccagttttatatcgatgttatcagatggtttaaagagaaagccagttaaggccaatatgggaatttcttctagttcatggaatcaaactaaaagtttagggagttcattccaacgtaggtaatgcatctcatggtaatttcaacgctacaagaaatttagttataagagttcaaaatgaatattaaagagaaactacttgtttctttttcacagtttaatacacatacaatttttgaatgattcttgtgtcatgataaaggcaatgttcttattaaattatggaagccatggagcagaaatgtagtaacaatagcctgtgtacaaacataattcataactgggtccaaaaagccttcaataatctaccaataaaaagaaaagctatagttgtcaaaatttacaaatatgtttaataaaagaactttgaagaaaaactaatgcttattattaaatatatattttagcctggtggccctcgtttctctctacaaggcttatccttaattgtttttaaaaatgttgagcttttacataaatacttggcaaatcaatgttaagtgttccggaatcatatataactttttttgggaaactcatttctaagcattctcttaccaaactcagttgggaaattttaataaaattatgcattccaaagacatgccttcttgaaggtagagttcccagaaagataagacattaaaaattatccctgcaaaaataaaggaaagactgaatgaattaaacatgaatccaaagtttggacaacattgaattttagaattccattttggcattttagaatatcttgactcactgaaaaattattaaaaaaaagtttttcctggagctttgtttttaatcgaatgagtttatattgtatattagaatgacatcaatttgagaaggcctagagttttgcagtatcctaatttagtgaaatattttaaagaatgataaaaggcaatttatttgttgaattgcatcttgttaaaattattaacaaagaaaggtactgtaaattgaagtaaaaatgtatttatgaaaatatttggactgaaacatttgcatgtttcaatatgaaaagaaaaaagagctgagaatagagtgcacttagaaaaatagattccaaattgttgcaacaattttagtgaaagtattttctcaattaaagacattatggtctatacaataatgtaaatgaagaataaatttaaagtattaaaaatatgaaatttattatacataaaatgcgagtccatacaggtttacaggtaattaaaaataatgccatcttttcaagattccttctcccattaccaatgacataatattagagacagatttaaattaaaagttgattaacatatatgactatctatgaaagatgattagttcgatgatgttattttttacatgttcaaatgacaaaacattttttgttattttgcctttattgctattatataatgagaggagatatatattgtttatatattttagaaataattttacttttaacattgtttttgaatagaaatattttataatctaccaacataagccaatttattaattaataaacagttatttttaaaaatgtgatacattatttttgacaccccatttcattctccaaaatatcccagtttacacattaaatcacgtgttcactcatctgtgataataatgacagagtgttctgtgaatacacacatacacacagaggggcacatgtactctcaacaaataataggattttttaaaataacgtattttcaccttcacctaatcttagtcaacagattctaagtgcttcttttctttaaatttttattttgtaatgttaagaacatttaacatgatacctaccctcttagtatatttctaaatgttgactagtggtacactgttgtacagcagttctctagagcttattcttcttgcttattgattactaatttctcatttcctccttctcctagcccctggaaaccactatttcacaattcaattctataaatttgattattctttttttatgaatatataacatttgttcatatttaaggagtatatgtgatactttgatataaggatacaatgggcaaggatcaaatcactgtaattaggatatccatcgcctgaagcatttatcatttctttgtattaggaacattattctactcttttagttattttgaaatatacaataaattattgttaactaatgttgccctattatgctaccaaacactagctcttgtttcttctatctgactatatgtttgtaaccattttagacacctcatataagtgaaatcatgcagtgtttgtctttctgacttacttcacttagcataaggttcatccaagttatggcatgttgcagatttctttcttaaggttgaatagtaatccattgtactatatatatagtacaatacatatatagtactatacaatggattactatatatctattactatacaatggattactatatatatagtactctctatatatagtactatatacatctatatgtatatagtactatacatatagtactatatatgtatatgtatatagtactatatatgtatatatgtatatagtactatatatgtatatatgtatatagtactatatagagagagtactatatatatatgcatatatgtatatatctctcatttttttaatctatgaaaatttaagttatttccccctcttgactattgtgaatagtgttgcaatgcacatagaagtgctactatctcttcaagatcctgatctcagtacttttggataaaatcccagtagtagagttgccagattatggtagtcctattttttcttttttgagaaacctccaaattttttccattgatgccgcaccactttgcatttccatgaacggtatgcaagggttccaatttccaatttttctccttccttgccaacacatgttattttctggggttttgtttgctctttttttttttaataatggctaccctaacaggtataaaatgacatttcgctgtgtttttgatttgttattctctaatgattagaatgttgaacatttttacatatacctgttggctatttgtatatcttttttttttttcgagaaatgtatatcaagaccttagctcattcctgagttggcttattgtttgtttgttttctattgagatgtaggaattccttacatgtttgggggtctaacatatatggtttgcaaataattttctcccattctgtaggttgacttttcattgctgatcatttcttttgctgtactggagcttcatagtttgatgtaataccacttgtttgctttttattacctgtgcttttggtattatatctgtgaaaatactggcaaaaacaatgtcatgaagtatttcccctaagttttcttttagaagttttacagtttcagacctcaaatttatgttgataatccgttttgattttttttttgcatatggtataagataaaggtccaatttccttcttttgcatgggaattatccattttttccaacactatttgttaaaaagaatgtatttctctttcaacaaagtaggaatagaagaaaattacttcaacataatgaaggccatatatgaaaagtttacagctaccattatactcaatggtgaaaaacagaaaaagcttttcctctatgatcaggaccaaagtaaggatacgtatcatcaccatttctatacaacaaagaggagaagtcttaaaaagagcacctaggacagacaaagaaatgaaaggcatccaaacaggaagggaagatgtaaaattgtgcctgttgcagacaacatgatcttatatatggaaaaccctgaaggctccatttaaaacaataagaagaacaacaacaaaatgttagaactaataaatgaattcagcaaagttgtaagataaaaaaccatatccaaaaattagttgcatttctatagactaacaacaaactatctgaaaagaaaattaggaaaacaatcccaaatattgtaaaaccatttacaatagcacaaaaataataaaatcttaggaataaacttaactaagaaggtaaattacttgtatatttaaaactataaaaatcatgaattaaacgagacacacagaaatggaaaggtattttgttttcatggaaaacaatattgttaagacatccatactactacccaaagcaatctacaaattcaatgcaatctgcatcaaaatctcagtggtattttctaccagtaatagaaaaatccattttgttttttttttttgagacagagtatcgctgtattgcccaggctggagggcagtgatgcacaatcttggctcgctgcaacctccgcgctcccgggttgaagctattctcctgcctcagcttccgaactagctgagactacaggcacatgccactacacctggctaatttttatatttttagtagaagcagggtttcaccatattggccaggctggtctccaattcctgacctcaggtgatccacccacctcagcctcccaaagtgctgggattacaggtgtgagccactgggcccggccagaaaaaattttaaaatgcatatggaatcacacaaaataatcaaatagccaaatcaatcttgagaaaaaagaacaaagccagaggcatcacactttctgatttcaaaatattttacaaaactacagtaatcaaaagagtgtggtactgacataatgacatgtaggccaatgaaacagaacagagagcccagaaataaatccatgtatatgtagttgactgatctgggacaagaatgctaaaaatacacaatggagaaaggatagtctcttcaaatgtcttccatcattaatttattcactcaaaaatatacattgaggccaggcacagtggctcacacctgtaatcccagcactttgggaggccaagactggtggatcacctgaggtcaggagttcaagaccagcctagccaacatgctgaaaccctgtcactactaaaaatgcaccaggcatggtggtgcgcctctgtaatcccagctactctggaggcttaggtgggagaactacttgaacccaggaggtggaggctgcagtgtgctgagatcatgccactgcactccagcctggatgacagagagagagagagagagttctgagaaggtcccacacctcatggaaaacttagccatacgagatacagtccttatatcaaagcataatctagtgaggaaaattatatacacacactatatatttgcacacaaatatatatgtaatttaatcacagtgggctaactgtcatgtcggaaatctgtgctggatgtagatattacacaggtaatagaattagcccagaacactttatttacggagcatctcatggaactggagtgctaccaaacacatttttggaaatcccactctctatagaagaaaatatttaaagggtttttggtaagtgaacataaatcagaattttctattttgagatatataggagttggattggaaggttgtagaatctctgagttgtccaaataaatttagatgactgccgctagagaaaaactgcctttgtcgggaaagaaatgataaagggctggaattgttttacatttagtcacactaatagggatgcagagagcctgagaacctgcatatgagagatcacagattttgaaaagagccagagcttgggatgattgcccatataaaaatgcttaaatgtcttaaacataatttgagtggaattatttatatttcaagattaacatactgcttgatacaagttgcctgcacattttcctttaagtaatgggctaatgggctctgcgtctctttgcctaaattaaatgtagtttgcaacaattcaaaatgcaaatattttttaaagtagtctttttttttttttttttgactggcattcacaaaagctacagcactcttgtattagcaggtaaaatctggaccttatttcatcctggacaatccttaagctgagatattcgccaaatggcattatatctgctttgtaaatgttgatctcaggctccacttattttagccgctgggtgtggtttgtcccagagtctcctgtgagcttattttgctaagcaatcagttacactctaataattgatcagcctttctgtgttctttacaaagcagacctatcactcagcaagattttttaacactattttcatgaagtctggatctactgaggatttgatggattcaagaagacaaactaaatgactttttggctacctcaggatagacaggggacaagaagaaagcaaaaagcaaaaaaggaaaacaagaatcaaatcattttccattagacatgaatggctcaaactagtgctctctcccttataagaattaaatttgttttactcgcatagagttaggggtcagaatttctctattttacaaacagcatattttcccttttgcttttgcactttaagaacttatatgtgggggatggggaattgaggtgtctgatttgttagttgaaggttatggtaattttttttgtttgctcgtactcattttacaagtggttaaaactttggtgatcgacatgaagacccattttcttctcttgcttggactcagagataacagatttgtgcttaattcccagccaagaaattggatggaatgaattaccatgttgtagtaaagactttgtaatctggagaccttgtgattattaattcagaggggattcatcagggtctacctctgttggctgattaatcagaggatgacatcaaggtaactgggatattgtttgggcctcaagggttcttatagtgcaaattattaaataatttttattattaaatatttttattattaaattgattttattattaaattattagatgcactaaatgaagaatgaggatttattaacttattattaaagatattctgaccaaaaaagataagttgacatgaataagcaagcactctaaacttggagaaagtaggtttaggaaaaacttgaggacccaagactgattgacagcatgacactgaaaatcttctgagtttctggttactcactgtaaaatgcatgtaatgttcacctcatgggtttttgtgaaaatttagtgatatgcagaatctagacgtggtctgtaagctacacttgcaattaaatataaaatattattatttttatttaagttataattgccttttgaagaatttccttaggtcaattcatttacaaatggtaacatttaaattatgatatgccttgcctacattttcatggaatgaacagggtattaaaaaatgttctacatatcaaaccctccaaaacaaattagcaagtatgatcaagtattatgtagatggttaggggcttgcaggacaatggtgactttcgcacctttgtttttattgagttgtaaattgggaccccttttgtttattacatgatcatccatcttagtaactggccttgccttgcacctttaatagagtttgataagagtcagttagatttataagcaatgactttacacctaagggtgggatatgaaactcctggactattagtgagcaaaagatattttaaattacataaaagtgttatacagccttcaagtaagaaaataaacatttctaggttattcaaacattttttaacataatttttgagggggtataattttagatttacaaaactttataccttcaatttttgtttttaaaataatggtattaatatatcctatggctttggacaaatagatttaccacttgacctcagtttctggttccataaatcaaggggtttagactgagtgagtatgaaaatctcttctaattagaacttcgttgaccccattattaatagttatttaatgaactgatgttggaaaatgagaagcagcagtgttgctgcctcagatttgggcagggttctcttgatgttggcagtgttgttaatatggcaacacattccctgttcattcatataggtcaccaggaatttatgaggaaagaatgcaaattttttgaggaccaagtgagttccagagaccttcaaacaatgagactaataatagtgaacagtcattgagaggtctctgtgccccagatgtgtaccttacctcatttgatagtcacaacattctagcaaaagctcagtttatcaccctacattttcaattgaaattaaaccgggttaagtgattttcccaggcagaaagtgactgagccagaatttgaatctgtagtgtcctggattcagaatgtgaactattcacctttacaacattctgcctatttctagctgcagtttctatcctaaataaatcatttctgattgtattatatcttgattacacatttcaactagaaatttagttaaacacaaaacaaaacaaaacagcaactcagtaattaagaccagagttctgtctgcttttccttttaaaatatcttaccatgatataatcagactctaatgctacatggttattaaggaaatttttctgttatcagtttttttgtgtgtgtaggagtacttgattgttccatttattgcaatctatgttccatacctaagatggcaaaaccctaactctacaacagtagccaagcagacactctgaaaagtacgaaatgaatttgagattctacaaagaatctccacattttttttcaccagaaaaaaaaaattgttttctcacaaggttctgctaacagaaatatctgagataacagaatcagtaaactattaccttcgaggccaaaatacattctaaataagttatgttactgttgtccaaaccatgtattaataggtagaggaactatactctaggtaagtgggaagaaggatcaccaaacattgaagtttggagggcagcaggcagatggggaagaggttgtctctacagcctcagaagtgcaatttatcttcatgacatcagttagatcttcattgctcaggtcccaaaccttgacctaataccctgagagggcttcatcccgcaagattggatttactctatttacaagagaaactggtgtataattcacagcaacttaatacatttgcaattgaaactatagtgatacagccaactggacagctcattgtctccatttagagcaatagttcatacctgtaacactgcctgaaaagagcttccacagacaggaaacactcccggtaatgaagaatgtctgcatggactgcatgataagggttttgtgcaattgttaaagcatgagctctaactttacctcttctgtcttaaggattctttaacatagcaccgtggctttacccctgctacagagaattctataggaaaatcccattgtaatcaaaggattgctttgtgattattgagatgctaacagatgattttgtcatttatttgtattttatgtaatcagctaatgatatttacatacatctttctctatgtctactgtgccagggacatgaatgctaagtcaggacaaccatacctctgaggacagtccttggatgatatctgcaaaaattgcctctgtaattattatgatttttttcaatctaagatccattgttaaccagctcccatcttgactgccgtttttttttgtttttgtttttgtttttgtttttaatggagtctcgctttgtcccccaggctggagtgcagtggcgggatctcgtctcattgcaacctccacctcctgggttcaagcaattgtctgcctcagcctcccgagtagctgggattacaggtgcttgccaccacggccagctaatttttttgtattttagtagagacagggtttcaccatcttgaccaggctggtcttgagctcctgccctcgtgatccacccaccttggcctcgcaaagtgctgggattacaggcgtgagccaccgcacccagccgtttactgccgtttttttatattaatataatcaactacttttgactaagtcaggtaactggtctccctttgtagagaaactttgaaaacatcttttctcatttattttgctcttactccaattttgctctaagaagacaaacacattttccttattttgaacttggcagtaggagaagtggactgctgttgctgctttgtttttttcagcttgctattttccatagccgtgctgtaattaataatcttttgtagtcaatagtttctaactattcagttatcccagttatccatgggattcttaaaaaaaaaaaaattgtcccaatatgctttagaactgaactgcacttcctgcctgcctgtctgccttccagtgttgtgcttttccatctctctctcccttcttctgttttctcttctttctctttttttcccttcctaagttcttcccttccttctttctttgagaataattcaggccaaaagatgttttggggggtcagacaaattaggtagtgagtgtgtatgtgtgcatgtgtgagtgtgtgtaaagatgtgagtggggatgtgtttgtgtgtgtgtgtgaaagggtgtgagtgtgagtttgtgaatgttggatggcaggcagacagtatgcagcctggagtgttggagcccaggtggagtaaggggacatccacccagggaagggcggagagggaagtagtcagttgccagcaagatgagatggaaaagtgatggagggattaatccaatatataaagatatggagtataatggaagccagttttctcactattggagaaaagattgacagcatatggaaatagaaaacattagaataagagttataattttggcttgagattgaaggtatcagtgtaaatcacaattaaactgaaagatacattagatatgttgacgttctaacccccagtacctcaggatgtgactatctttagagataaggcctttaaagatgttttaaggttaagtgaggtcattaaggtgtgtcctaatccaatatgactgatgtccttgtaagaggaaatttgaacacgcaaagagagatggcgggtacacatgtgcagaagaaaggacttctgcaagccaaggagtgaatttccaggaaaatcaaccctgctgtcaccttgatctcagacttccagccttcagatccatgagcaaataaatttctattctttaagctactcagtcactggtattttcttaggatagccctagcaaactaatacttattggtagatataaatatgaaaataaaaatgaatgtcaatatgagtagaaataaatttagatataaatacgcatgcatatacgtatatgtatatctgtatgtaaatatatatactcatcttgtagcaggacgatccacagacaagaacccctcggacaccgagttgtggaaggaaaggcctttattcagctgggagcatcggcgggctcacgtctccaaaaactgagctccccgagtgagcaattcctgtcccttttaagggctcacaactctaagggggtccatgtgagagggtcgtgatcgattgagcaagcagggggtacgtgactgggggctgcatgcactggtaatcagaacagaacagaacaggacagggattttcacagtgcttttccatacaatgtctggaatctatagataacataaccagttaggtcaggggtccatctttaactaccagacccagggagtggctccgggctgtctgcctgtggatttcatttatgccttttagtttttacttcttctttctttggaggcagaaattgggcataagacaatatgaggggtggtctccgcccttaatctatattgcctcgctctgtccactaaagagggtctgggaactgcagtccaccgataccagtaagaaaaatttgtgttctaaatacctggttcttggttgctaaatgctgttccacactaaaaggaaccagactttttaaaaacattttactttaagttctgggatgcatgtgctgagcatgcaggtttgttatataggtatacatgtgccatggtggtgtgctgcacctatcaacccgtcatctagcttttaagccccgcatgcattaggtatttgtcctaatgctctccctcccctttccctctacccactgacaggccccagtgtgtggtgttcccctctctgtgtccatgtgttctcatttttcaactcccacttatgaatgagaacatgtggtgtttggtgttctgttcctgtattagtttgctgaggatgatggtttccagcttcatccatgtccctgcaaaggaaccagactttttagagaaatagctgattactagacctgggcagggaaaattcaagatgtagttggaacattttattttgtcaaaaagaaaagaaatgatcaaagaattatagggacatatagaggagagtcaatttatcaggcatcccactagaaaaccttgagattttcacccagtaagtgaaacaagataaatcttgaatataaactgatagaaattaataaatgaacaaatcaaatggtaaggaatcacatatttacatcatttcaaggtaatatcctgtaaaatatttatcaatcacaaataataaagaagtgactaactgtactgtaagaaatcttggcagatatgactttagtcaagtgctcaaagtgaacatcataagtaatggaacaaactaaatcttggaacagctgatagaataaaacaaggaaaacagagcatcactcttgtggcagtcttgccaaaggcataaaagctgaatataatcctgtgaacacattagacaaacccaaattgaggaaatactataatataatcgggcaatcttcgtaagtgtcaggaaagattgggaaatttccaggttgaaggagactagtattgacatgacaggtaaatataattgtgatgcatgatcttcatttagatcttttttttttttttgagaacgagttttgctcttgtctcccagactggagcacaatggcaagatcttggcacactgcaacctccacctcccgggttcaagcagttctcctgcctcaacctcccgagcagctgggattacagggacatgccaccatacccagctaatttttgtatttttagtagagacagggtttcaccatgttggccaggctggtcttgaactcctgacctcaggtggtccacccgactcagcctcccaaaatactgggattacaggcgggagccaccgtgcccagcctagatcattttttactataaagctgattattgggataactggcaaaacttagatgtggtctgtgggttacataatagtaatatattcatattaatgccctaattttgtcatcattttgtagaaataatgcaataaaacattcagggctgatggggcatcatgtcaacacacctcaaatgattcaggaaaaaaatataaattttgtactatttttgtaaattcaagatgaaaaaataagtattgctgttacaagtaatttatctgtccatctgtccatgtatctatccaccaatgtctttatccatctcctattaaagaaaactaaaatcagaaactttttttgaactcatattaattcttatattgaatttacaagtttatggagtctgttacctgagagttagaaaagataaaactcaggttccactgttcgtccagggactgtgatgagtattttcatctatattaccttatttacatttataatagttccaagaggtaagtttttgtatatgcattttacagagtaagaggatgaggctctgagaatttgaatggattattcaaggattcattcgttcagctcctgcacatcagggctcagaattcagtgccttctgccgcctggagttctttctgataaatcatggtaacttcatctggcttagggggataagcttcagtcaggcagtaagattctctggagcctttttgcagtgctagggatatgacaactaagcaaagacttctgagaaattgtcaagggagtccataaatttcagtggaagtagacctaggttagccatttaataatgagagtttttgccttggttttgtcagttattttttcttgtgactatttaagagactcagagacccagttgctttatccctaaaatgggcacaacttcctggcctgtaatttcattaggtggtttaaagaatacatgagatgatgagttaaaagtgatttgcacttctaaaggtgctatattgacctagcatgatgctgatttgtatttgggtatgagttgtccttataattagggtagaggttagaacaaaggaatacattctccctcatagatgagtcaatccataatctccaggaacttgtttttttgttgttgttttttgtttttgtttttgttttttcccctaaaagtttcaggctgtggtaatgcagtagagtgattgcataattgattccaatctttcattgtcctcaatccatttcccctgccctacaactatgtaacatcctcccaatcagactctgaactcaaccacatgacttgatttagccaatgggatattaacatatgtgacacaatcagaggcttgaagtcttgctgattgggtttgttctcacttgtcctcttctttaccctgaaaggaaatgctcagataagcaggtggtttcagcaggagggtgagagacatggaggagggctagtttgctctacacatccattgccttcctagatgagttgacagagagctgatctgtacacatacttagcgcacctaggagctgacaaaaccatctaatttactacccacagatagctcagttcaataaacacttattattgatagctcctaaacaatacattgtgattttagtaaggcatgcatatatactatgataaagtaaaaagcaaagtttctgtaactttaacatgaaaccaggagcttcaatattactttcgtacctaccagcttccattttcagcattaccttcagatgcccctatatctgcagcaatcgaggactgtatttcagaaataattaatttaggaaataaaacagcaactacttaagagatgctgatattgaacttccacctgaaatctatcccattgcacatatatctagggctcagtatagaaagaaagaactaagtatgactgtgacctagaatactccttggaaatggaaatagttaaatcatctaggagcttttcctctggaattatgggagctggtttcccttttctttttggatgggtgggaggaaaagtttgatttgaaatataaacctcttttagtgtaattattttataatgtcttatttgaaacaatatatacacagtcatatttcttaaattattattataattcaaataagtaaggatattgtaaatctcccttccaaatttttaaagtaatcttgctaatagcatttttttttttttttttttgagacggagtctctctctgtcgcccaggctggagtgcagtggcgcgatctcggctcactgaaagctcagcctcccgggttcacgccattctccggcctcagcctcccaagtagctggtactataggcacccgccaccacgcctggctaatttctttttgtatttttagtagagatggggtttcaccgtgttagccaagatggtctcgatctcctgacctcgtgatccgcccgcctcggcctcccaaagtgctgggattacaggcgtgagccaccgtgcccagccgccaataacactttttaaactcctgtgcatcatctgtgtaatgctatctttcttgcagcataacagacgtatttttattgatcgtaatatataatatcaactcttttttttttttttttttttttgagatggagtctggcactgtcgcccaggctggagtgcagtggcacaatctaggctcactgcaagctcctcctcccgggttcacgccattctcctgcctcagcctccagagtagctgggacgacaggcgccggccaccatgcccggctaatttcagtagagaccgggtgttagccaggatagtctcgatctcctgacctcgtgatccgaccacctcagcctcccaaagtgctgggattacaggcgtgagccactgcggctggcttataatgtcaacttttaaacttcattcctctgtaatggattttgcatggccaccttgcaggtagaatcagaaatgttgcagtcctcttttgaaagtgcataacaaaatcttgttttaagagaacaggtgctagggcttgtattctaaccaaactccagttcttagcaactgcattctaactgcagaattactcatacaatttgaactacactagatttctttgttcatctcttcttaattaataattgcaatgttagggaaatgcaaaagttgcataataaataccgagatagtttttttttaaatgatatatgtagtaaacatagtttaacttaaaaacaacatggagctggcatcgtcattaacaagctgtgtgattttgtacgtgttactttacttctccaaccattgccttctttatatgtgttaatatggaaaaatgtctatgatatatgttcagtaaaaaaagctgaaacaattgtatttatgctctaatcctgtgataatatagatgggattttaattatgcaagttcctaaagttagaaatacgtgtataaaagtgagtttttataacaaaagtattcctagggtactaaatacttataaaattagtctccacccaatcatccatcttcacttaacttttccactcatatatcatgcatgtgtaaatcatctctaactgatttctaaatgttacattccacaaaacaacataaatgcagggcaaatcaaacacacaatggaattgcatatcatgtactacatgcaatatttcatggatctctcatagtaagattgaagaattactcaaatcccacccaaaactgttgcccatcaattactgtatttgaaaaatagggggaaaaaacaaagaagaaagggaggaaggtagagaaggagggaagaagacaacatgatgatgatagagttggcaccgcaaaatattttctaaaaatataccaaaagattaagcaatctatgcaatcataaaatttgtagagaaaaattactcaaaagtgtcagcacatgagccatattttattcattcgtaaaattattatatggaacaattaaacctaagttttattaaatgtaaaacgatatactatctacatattgagttttatatttctaattttgttctttttaaaataaaataatgctacataatttaattttatccactttaaatggtctaacttcattcattttcagatacagaagatcttctaggtcttctgtatagaaatatatacacaccatctgcacacatacacacatatgtacaaatacatctatctatatatgtatgtatatatgtatatatattccagtatatacatacatatgtgtgtatatatattccatgtatagtgtgtatatatgtatgtatatatgtatatatattccagtatatacatatgtgtatatatatattccatatatagtgtgtatatgtatagacacacatatacatgcatatatgtatatacactgatgtatatatacattgatgtatatatgtatgtatatatgtacatatacatatatgtgtgtgtgtgtatatatatatatttatgcacacacatatatattccagttttcaaatggagccaaaacactggatttgctggctttttcccattcaagtctagaatagactccagttctccctcagctccaacatggatgtttttgaacagtcagggaagttatagatccatggtcagtatttcacagggcacttgggatatctagctatgtttaagtatgtacaattagtaacaagaggagataaagcagaagaaactaatggggttgcactttgagtgaacttttaataattcagattgaaagatagacttattttcaaattggcctgtgatatgaatagtgtggtacaggaaagaagatcagaggataacctagaacctggaggacaaaaaaagaagtgactcatgccacgtttttttttttttttttttaaatcatggaaggaattctaggagataataataaaaccacacccagtaagatatataactggttatgaaattcttccaaattatatattcaaggttatatatttttgtctagtaaaattgaccaagcaacaagtgcccattttgctttgtgagagaaaattgcatcaatttttggataccttaaaagacctcattaaaagagactattgaaagattattataaatttctagccacaacaagggaactttccttgactaattaaggcaataatctcgtgccagaagggcctggacaagggttatttctttccgggttgtcttctggttcaatggcataatagattacaacaattgactgatctatctcattgatacttattgtctgaataatcatggccttgttacctatagcttcaacaatagcaataataagacaaacaaaatacacaaatacattctgtctctcacacacacacacacacacacacacacacacacacacgcacacgcacaatccagccttggaaatttaagaacttgtccagtcgggcaaggcaggacctggaaaaacagaaccaaatagatgtgttcaggaggaagtccagtgaaacaggcaagtggataagaggcaaagacatagacagcgtacagttcaggcaggtaataagcatgaagaaggagacagcagtaaaacataaataaattaattaattaattaaaacaaaaagcatcctggaacccaaaagcacaggcagaaagcagaaaagaggtatctaagaagcaatggtctggaatccaggcagaaggcgtgtggtcagcaccagagagcacaatcagcggacaatcatgctttgggccatttaaaagaaatacatttaaattttacacatgcagctcttggatggcattgggtgagtgcaagacaaagccctcacactgggcaacctgtcaacaacatggaacagtggaactggaactgactttggagtccaacagtgctgagctcataccttcactccagcatttacaagttgtagatgagtacaacttgtacagttaacctcctcatctgtaaactgactaataacatctctttgctcatttgaagattagacaaagtaatatacatgtgtaaaacacaaaggatagtgctcagcatataacaagtgtttatagtttatgaattttctttagagctagggaaaaaaatgagtttaagagcaggttaaccacaagaaatttatgactgaattcaatgtgcatcataaaatacattaaattcttgttgcccatacttacagagttgaagttagagctgattctagcagacaatgggtgagacacgaaatggtttcaagtaatcctgggtctgcacagggaggtgggaaatgcagagggtagggagccagacaggagagttggttttatgcagaaaatgccagcagattgattttctaaagtaagagatttttaattcaattccctttgcacctcttcctctgcctgagattctgctatattacactctaaaatagctattatcactatctgttacaaagctgatgcagaataattgagcatgtccctggagaaattacacaaacaaattccttaattctgcagaattatgcagggcccggaggggattcctcatgctcccctaccttctcatcaatgttggataattagttttctgtctgaggcatatttataacatcagtggagttatcagtggtcaataaggtgatgcttgggtgccaataattgggaaacttgacattttccaattagatgaatttctcagtgttgattgaaagatccaataccggtcaccattttctgcattattttctgggtagctcagtgggacacactgagagagtatggattagaagagacaggggccagagaagggggttggtaaaaataaggattgtgttgctggaggcagcaaaacatattttccctcatctaaagaaatttcccaagagatgaaccagaatgcaaatgatctgtgctgaagtcctcgagtagactgtgagtttcctctagttcaatgtgtaatatgaactcctagcataatgcttgccacatagaaagctctaaaaatattccgtttatctttggtgaaaggctggagggaaaatggtatattcaacattaataaatatttaacatttaaaaaatttttccttttgtaatttaccccattgtctacctccagtgaagactaattgctagaatacttcagcctgccaatgagaaaacatgttcagcaagggaagtcgggatagtaatgtcctgtattacccttgctggagggttctgtaactatccattttgtcttacttctgcccggccatttcactccactgactggttctatcatatttccatttcccaataggactcttctttccattaaatccagtggctttgctagggaatgaaaagacttgggttatgacatagggttgtcatgggcttacattgcagctgcacctctctaacttaattgggtgactccaagattcctttgtgtttttaggatcttttctttaatgatatctaattccttgggttgtcctatgtaattcatgtgtaataaacatggaattgtgcaagaccccaagttgaaagcatcagttaggagttagaccatgtaaaacctatggaaataatgaagtgtttcctccattagctagaaattgaaggagtatatcttgaagatgtgttgcagggctaacattctaggatgctaacattctatatcagaaaatccagtacctacgcccaacttcttcactcatatgctgcagaaatacagaagaaatgtacctccatacctgggacttattagcattcgggtacttggtttcaatcctaatctgagacatactaccagatccccacaccctcccctcccccaaaaattaaagcttgcatttccaaactattgacaataccaaagtctgttctcattaacgattcattaaatatccaatgacataatatttgccttagacaacacaaagtagagtataccattatgggttgcttaaatcacaaattgagctgacttcaagcaatgactcccatgagattaaaatacagtatttgaggaagtagcatgcagagataaatggaatgcttactaaagagagagagaaagagtttacaataccacttttggtatagaaacaagaatctaagggaataaatctgctttttcaagtactatttttaacatttgttacatacactttgtatttaaaaaaaatctcctgacatttatggttaagaagtagcttgcaaaatctttctccagttctctcatagaggaggaaaaaagtctgtaaatattttcagaagacaagtatgcctgtaatactatgaaatgagattaagttaccctactagtaatatgatctttgcattggaagcaaattcctttttgtgatttttttcctgagttggttatacagcagactagatgacgatgataaaggtatcaaggtctaagtttttatttttattttaaaatactgtttttttttttaaatcagatacatgaggccacacaaaacaactacctagcttaatgaactgtttcaagtcaaatagctttgcaaccaccatagcggtcaatgagtaactttgccagccagcccagaatccctgtcccaagtgcttcgtctcaaacccacctacctctctgccctacaacctagcctgacttttatagtacttgctgccttaatacttttatatttttataattcaaatatgcatccatagacactagagtttatccaactattttttttctatttggttatgtcttttgtgtcttttttagtctacatgttcatccaccattctcttcttttttttaatttaaaaacacaattcattgttgagggactgggcccattcgaactgtagtttcccacagcctggaattcgagattgcagtctctctgaatccagccaggccttcatgactttagcaggactgtaggtggagttgcttttcttcaacaggtgcaaaatgcataaatccactaaataattgagggttgaaaatggtgatattcaaaatccatatttttttttacatattagttgaaataattctgtaggaatcacttgctctcatctcctatttagttacccaatgatattgttcatataggaaaggcaggataaaagccagatatttaccagttttcaagataatgatttttttcctatcatctttgaaaggtgatcattttttttaacatggcagtatgaacacatggatttaaacttacttatttgatgcattttaatacattgcaattgttaaccttgtggaagctaaaattgtctcttatttgaagatgatattttctatttaaaaaatgctgactaatgtgtattgactgataacttttttgagtactttatatgtattattcagcgtaatgctcccagaagtcctcaaagtatcctttcacaaattagaaagctgaaacacaaaacatttcagtaattctccaaagttctcttagctagatgagataaaactgcaatagaagtcagggctaccttcttgatcctgctgcatttattatggtacaagcttactaatcaaattttttaattttcagatttagtttttgtctcctatagcaaaaagatgtatgtgagttatcaaatctacatttatgcccattttaccaaggaaatggagacttagagaagttaagtgatgggttcaaaaacatatagtatatgtgcctcataagagacaaagaccaaactctagccttgggcctcctgtcctttgaagcagtattgtccttcccatggagtgatcactgaagtgattggagatagttgacaatgtacctccacatgatgtcacaggcccagtcccggtggcaaatctgcttatctgtttccaagtagagaaaagtgatcacacacaaacacacacacacacacacacacacacccctttatgggaagagaagaatgcacagttttacaacaaatagcagtgcttcatgaatgttgcaattctaaagatcaagtcaggaacctttctaaaatgaaggcaaatggaattgtatgcaggttattgtccacagcggtcataatatctcaatgtctgatattctcttgaagtttatatttttaattattgtactttctacacagcttcagcattttttttttctaaagacaaacgaataggtaggaggataactagtgagaaccgcaccccccacacaatcaccacttcatgttttctaagatgggtatatttgcaaaaacatgtatggatctaaattctcttttatatcatatccatctttctttggagtctacagtgcatccatgatcattgtgtacccctgagttactaatttcttttataaatagaagggtttgctgaagagaatttttcagtgctgatttctgaagttgcttgttatttaggtatttttgattaggtctcaagaaaaatatatggagtctttaagatgtttggaatagaagtgccttcatagctgaatgcgaaagaatccatggacacttatttgttatatatgctgggagctggtgctcggaatacctcagagaataactcacggaagtctgaatgagtagggtgggggaatactgaaaataaagtttcttgttagatacttgaactaataaaagtttctcccacaattactcagttctaacactggattaaggcacatccccctcacctcatgatatttaagtacatgtatacttgccataaatactctgtttatctgcaagatgtaattagatctctaaaaaagtgacagttcacaagacagttatgatatttcaatttagtgcaaacctgtagatttaattgcctcaaataacaacacagattgtatttcaaactcttcaggattcaggatcatctgttatatgttagtacattattacacggcatactgtaagactgggtttacaacaaacagatgcaccaaaatgctatgcttcccaaaatgtggactttagtttttacaggaaggtgaattaaaattaagatgcagatgagcttcttgatttcacagtatgttttaagtggaattgccttgggaatgaaaactagccccagcacagtagggtgactatcacggacagtattgtattttatatttcaaaatacgtaggaaagatgattttgactgttctcaaagaaattatcaacgtttgaggtaatggataagctaattaatgtgatatgatcattacacagcatatacctgtatcaaaacatcacactgtaccccgtgaatacatccaacgattatgtgtcaattaaaaataaagtaaaactttacaaaatcaaatgagctactctgaagcatttgcaatgacttcatagtttaaactgggatagaatctcaaactagaaaagggcaaggagcctgttctcactaaccatgtcactcttggagcagatggcctttcctgaaggctgcgacattttttgcatatccctttatttcaaaggctgttatggtcatgaaatggaataatgtgaggacccctaagggagctcaggcatgttcagaaatacttgatgagattatcttccaatatgaatgtgcaaggaagtgttttaattctagtcataatttaacaagatgaaatcaagctaaagatgtaatatattaattggatcttgtgtaaccactaaaagcagtgctagagacctctacatattgatgttaagacatgaacgacatgtgaatttctatgtgaaaagagcagttatgaggacggtttgtatgatagttgggttcttcctttacacacaccgtcctcatgctgtctgctgttatactttgtgtttgcctccctgcagtggcccagcctctgaaatgttttgccttcctccactccctcactgtgttctagtcccctaaaaactcaaatgactttactctgaatatctgggatctgacaaaccaattgccatatggccagtccatatttagaggagatattgtgagatctctaatctgttgctaccactattactcatgagaacaaagatccctcctactatttcttagttttttctatagattaaccttattctctggtctacaattataatcatagttttgcaaatacagattactcattctattttagttccagggtggcaaattctcaatgctatttaaacccattgtccagtttctctatatccacatccaaaagagcagaacattgctggagaaaacctcttaaacagaagatgggctttactttgtattaaaaaatgagtcaactctgtctaataatcttaccacaattgtgtaaaaaactcatttttatactgtaaagaaaaatgaattcatagagcttctttttttcctaaaagctactgaccatcctaagtacttcttgagacaagggaagactttgtatttcatgaggtaatggaagatctaaatggaaacttcctcatcctcccaacaactaacctcaaaatccatttcctcaatgtctgtcttctcattttgcccttctgttaaaattaactcagtgatctgccttctaccaatggccagtgcgttcatagtttgattcctttcatgcatacttgctcaatgatttggccatttatcccttctttctgttgaaacatacatatccctttcttaaatggtcattgataacattttataaacgtagtttagaatttctcatttttgaaaaagaaagaaaaatcttatttccttctcatttatttcctgctaccaccctatttcttctacctgttgtttttcctataccaatatttctctaagaagtcatttatatattctgtcactaacctcctctcttcattcttcaaccattgcaacttggatttctctcagaccactgtatgaagctgctcttgtcaaggtcaccaaattcagttgccccgtatttgtcttcatcttctcacctcacagcttcatttgacacatttgatgatgttctcctatttaaaacactttctggtttttggttacatctcacttttcaggattcttcctgtctctcaggctgtatttcacaatctaacttgaagcctatttttttttctattctcaatcttaaaattttcaaattccacagggctccttcactttcctttctactgccctctcctatgttatctcattccttcccagggagttaagttacaatcttagacatggtgaagatgtttctggcagtgtgctctagagctagttaaattctgggtaagcctggtgaatctaacagtaaagttgaggcatgaatctagttgctactggtaaggacttcatctctctcagagactgctgtaagcatgggtatagtgtgagaagtgggcatgtgagctgcattggctggcggcagccctcttggtaaatgccgaccaatggcatctgcccttcttctctctgtggcctgctttgccctttctgtgttgtctggtttgtctggtgagaatgtacctttgctgctataattttcattaggcaaatatttctctttatttaaacttttaggttcaggggtacatgtgatggtgtgttacataggtaatctcctgtcatagggttctgttgtagagattattccatcacccaggtattaagaccagtaccccatagctgacttttctgctcctctccctcctccaagcctccaccctgaagtagatcccagtgtctgttttttccttgcctgtgttcctaagttctcatcatctagctcctacttttaagtgagaacatgcagtatttggtttctgttcctgcattagtttactaaggataatggcctccaactccatccatgttcccacaaaacacatgatctctttctttttatggctgcatagtattccatgttgtacatgtaccacattttctttatccagtctgtcattgatgggcgttgaggttgattccatgtctttgctattgtgagtaatgctgcaatgaacttacacatgcatgtgactttatggtagaataatttctattcctctgggtatatacccataatgggattactagttcgaatggtagttctgcttttagctctttgaggaattgccatactgctttccacaatggttgaactaatttacactagcatcaacagtgtataagtgttcccttttcttcacaacctcgtaagcatttattttttgactttttaataatagccattctgactggtgtgagatggtatctcactgtgattttgatttgcatatctgtaatgatcagtgatattgagcttttttttcatatgcttattggctgcatgtatgtctttttttgagaagtgtcttttcatatcctctgctcactttttaatgtttttttcttgcaaatttgttgaagttccttataaatgctggatattagacttttgtcagatacataattttcacatgttttctcccattctctaggttgtctgtttacactgttgatagtttcttttgctgtgcagaagctcttaagttagttcccatttgttgatttagcattttttttcttgatcatgagcctgacactggtatgggtgctgggactgagacaataataacagttaaccctgacatagaatttactttgtgccagacatgtttctaagtcctgtaatacgtgaatttatttaatcctcacaaataccacattttacagatgaggacacgtagactcagtgaggtgaagtaagtttcccaaggtcaaaaggctgggaagtggcagagctggctttgcacccagaaggtttggctccaaatccttgaagtcaccagctggtgagaagagacacaacactcgctacattacaaggtggtaaaagatgaaagagaggtttggaacacgtggagctctagggaggaaggtcctttctccacctgggaatgatttccagaggcaatagccatttgggctaggatttgacatttctaacaaaggagtagaaacaatctcacaagagagaaatgcattgcaaattgcagaaacaaggaagggtgtggccatcttgaggcacttcgagactttcatggtggctagaggataagcttgtgttgcttttgctgtgaggaaggagatggctcagaatgatgcaaagtcaccagcttggccattagcaggctcagctcaagtgcctattgcctgaattaccattcttccttatctctacaaggcagttacacaagaaaaaccccttgggtgtctctcagctaagatttttttgtagttatagaaaacctcctaaaccctaagccatgactcagctttcctgcagattaatctagatgatctaagcctagttctgtcactgcacataactcaggccccacctcctattgcataccatttaaaagcagggtgagcagcaatcaagacctgctggaactgagggggttcctcgattgcattacattaagtactgaaatatggtaattgcagacaaatcaggaagaatgggataaactatctgaagtctacctgatgtgccagaaataagatgcatgacaactcataatgcaaagacgtcaaattcgcatttctctaaagtatagaataactgttaaataaatatagagatgctcattttagttttacattcttttaacctctactattctagttattttctcttatcaggtttgtgttgtctaacaggtctgcttccgagcttaacctcatattcttgggcatttctctccctatcggatatatagtcttccatgtttttgttattttctacaaaggaaagtgctctattttttgattatttaaatattacatgttccttctaaaaatattaaatatataaaaaacataacaaaaaattcaaaatcacatgaaattatattactctgagataaccaccattaataatttgttgaacatacttgcatttgtttgtgcatatgcatatttttgtatgcatgcataaaatttcataaaatcgtattattactccttcctaacttattttcccctctcatctatgtatttttttttctctttcttcctaataccatccagctgatcatggtaaccactgttgatttcttggagcatagacttcagttgagttcaggtcctcaagatgcagattccaagacaggattatatgtgaataaagatgtatttagggaattacctacacaagataaagggaaggaaggagaagttgagaggagcctttaaacaggcctgacttccatgaaggaaaagagaaagtctgagactaccgtctagttctgaaaaagtttggctaagccgagggggattcattgaaccaaactcacccagttgagtacttacaacttgaaggaatgggcctctattatgagccatgctgtgtccagtcatcaggtgctagtagcctgtatgaagagtggtcttagtatgaacaagggttggacccagaaggacagcagctggtacgtttcctgcaacccagaaggacagcttgtatgtttcctacagcagatctgagcagcatgtagcttccttcatatttgtatggcaaagtgcaaatgcacatgcatgcataatggtccttagtcattgtttttacaaatataaaatcattttatgtacactaaatattgctcttgtcactaaacagtatcaatggaaagtcatccaagtgcagcaaatataggactcattcttttcaagggacaccatactttccaatacttatatatccaaatttactcaagccatttgttattaatgagaattctcttgaggcctaaatataaagtattaaaacacttgtaaataaaaaatttacaagttttgttttgcttaaaattaggaatttaatatatatatatagtaagtcagttgtaacacttccattttccttgagcttccaaaattttgttgacatcaatttttttcattgtcatcatctttcctattaagtttatcttcaagtattcatgtttttaaagatatatatacttaatctttttaattctcatttttgctttgaggaataattaaaaataaaaatgtgttaatatatcatatttcatgatttattgttacatattaacttttaacttattttttccagtttttaaaaagttggtattttatttgcaattttatattaagaactgatttgattttcaggtgactgacatttttattattttttattgtatccaagaataagatatgtcattacttaagttcaggctatgttttatttctttcaataagatttaataattatttcctcatatgttttataactttcttattaaattaattcttatgtatatgatagtattatcacttctgagaacagaatgttttccatttttacttatattttggataagtatcatatatccaactaccttaagtgttcctttattaatttgattgcttctttaattggccatcttgttttatctagatttattatgatattttcagtaaaattatagttttatttttctttcaatctttatctgaatttattaaaaatgttaatcatattttatgtaactatagtattaatagacacttccatcttatccatatcataatagaaatggctttagtattttggtttttaaaagttgtaagtttttgtgaaatgtctcatattaaagagtatttcctctttttctattttaatttcattttaaataagaaacgactggtttatttaattaagtaatgttttatgtattgaaataattatatgactctttttctgttagtttttcaatgatgcatgagtcttataggtccctaatatattaactaaatcattattgtgttctacctggtagtatttattgaagattactgtatctttgcagacatagatctatttctaatataccaatattcctgttctataattttctttcttttactctctttactgggattgatttttcatttcatgcctgcattaaaaatgaattgataaagtgtccatctcttcctatagtctgtaaaattttaattatctttgtaattgtctgctatttaaaaagaaagctagacttaggaaaaggaagtatgttgttttaatgcctcttgggggaggaagggataaaatctttaatcatttacttgcaccttccaccgtaaatggcctatttaaatttgctgctttttgttgttgttgttgttaactttgctgctttaaaatttacagtatgccatcatttttacctggcctttaaaatgtattgaaatatttggccaggcaccatggctcacgcctgtaatcccagctctctgggaggctgaggtggacggatcccctgagctcaagaatttgagatcagcctgagtaacatggcgaaacctcgcctctaccaaaaatacaacaaattagccgggcattgtggtagacacctgtggtcccagctacttgggaggctgaagtgggagaatcgcttgagcctgtgaggcagaggttgcagtgggccaagatggcaccactgtgctccatcctgggttttgtatttcttcccaacactcccatccttaaaatggatcctaacccttgaatttcaagaaatatgctagatcccaatcacatttctcagttttgcttaaaccagatttgtctattccaattctccaccatattctctgtctcatgcagacttgcatgtgtaaaataaccttaactgtaatatctagagaaattgagaggaaaagacatagaggtgaggagatgtcagctcctgaaagatttttaaccatcataagccatttgaacttcaatatgagggcaataggggtagggcatagaactatattaagcaccaaagttacttaatgagactggtttattttaaattctctacttcttttctcttaaagtggtcgttaataacatgcatcttggaattagacaaaccttcctacatttatttgatttatgactttaagcctgaggttccatatcaataaaaattgagacactaattttgttttcacaagggacatctgaaatattacggtgctaaattatgtgcacagtgcttattacatagtaaacaatcaataaatgatattcaatcaacaatcaccatcatcttcgtcttcatcatagtttctatctctattatgttacagatataggtaaatgtggtctttttagtgaagcatatagatttttcccacagtcttgattggaaaagtgagagtatagctgattgagagaactcactgtcagctgccaaccaatacagactgttcaacttttgtttttattttgttgaaaggtctttctcttgctttcatagcttgctgtaaatactgcattctaatcactatgatataaatatttttgataaaagaattaatggaaaagtaattgtagagacaaaaaactgagaaagtttggcattaattatcttgaaacacagtcagtccctctgtcatttgcagatagtcactacttttaaaagcaaatagttctattggtcatggcaactctcagtagcagctatgagaaataaccaactcatggctgaatatagtaaaagttttttctcaatcacatcacagtttaatgtttgttgggtggctctcctgagcagcaccattcctctggagtgacgtggggacctactgcttctatctagtggtcggccttgttggaattttctatttctagctgtaagggcaagggacacagagtgggtggggaggggacacagagtgggtggggagggcaccctggctctttactccctgaatcctaacatggcacactgcacttccagtcacgttttagtggccagatattagtcacaaggtcaagtataaatgtatatttcagccttctgatatttgcacacagacttcctgagtgtgcagaaagagaaaaatgggcagtttaggaaacccagggatgtggggaggtgagtgtatacccacgtatataataagccagcaacagctaaagatttagaacatggcatccagatccatagtcattttttaaatggacaaataccatagtcattttttaaaactttgatgagattatgaatgagaaacaattgaacattattttttgaagccattatttatttatgacatttcctattcattttacatttttttcacatacgtaaaagagaaaaattggatgtacatatgcgtgcttaacagtggaatagtgttgacatattttcccctcagggtttcaccgggagttcttaactaaaaaatatgtatcctcataattaattaagaatgttattaattttgcatcaataatcattatctaggtgattttatttcatttaatcatgcaatatggctatttctacctctgagagtcagcctgttccctgagattttttctaattttttatacccagaaaacttagtatttatgtatattttcagaaaaagtattaggtgaatatttatatttttattattttattttctttaaatacaatatgtcacatacttatatatgtgatatgtttcacatatatcaaaacatcacatatttatggtgaacaatatgatgttttgatttgtgtgctataaacaaatccagctaattaatatatccatcatctcacctacttatcattttttgtgatgagaacatttaaaatctactcttttagcaattttgaaatatacagtacatcattattaactatagataccaagctaattatgaaactaaaattttctatctttttgatgtttcaacaatttcaatattttgaaaatatttaataactgaagtgttattcatttgagtatcttaagatgatatattcaaagagagatcatacaatatgataatgctattaagcatttttacaaatgttcaatgatattaaacaaattaaaattaaaagtacttctatttgtgatgagctcttaatacataaggggtcattttttgagaaacagctgttatattactttcttttctcaggtatgtagttaacagataaaagtttagataatgaataaaatctcacagatcacttttccatgtgcatacattgtttggataaacaactgattaatgatgtctcatcctttcaatcagaaatgtatttgtaggaaataaaaagtgtgaatgcttgagctgaggctgtcagtgatattattttgcataattatattttctgttgattcattttgcatatttctttggatggagcttctctgaattgattaaaacttccattttatcacctatttgaatttaatttttgctcaggaaattctgcttcgaatggacattttgatgcatcatattcataagaaaaggaaaagaaagcatagaaggtgaggggcctgggagtttccacttaccttgatccctgtaccatttatttgctggttaccagttcctcctctctgatatgtggttgggataaagttaatgggtaacctttcaggctcaacatttctcagcgtaacacttctctttgaaccatagagaaagagaaattcttagactctaacactctatcttgttgctcttaagattccaggtgaatccggacacaaagtgcctattttacacaataggatcctgttgtgctgagtgtgtcagagcataggctggcatctcatagctcttactgttaaaagaaaaaaaaatatggcaattatttctttgtcgtgagatgacattctctgagtgctcagtatcttcttaactcagcaggaatactctttgtaatatagaaagcatacaagacaaaaggcaccttcccaatttgtgtgttctttcttttaatcttgacaaaagtattgcaggcctctttggtgccagattctgtataataccctgaaatgcagagaccttgtgtgcttagatgactaatacaattagatgacagggcaaaaagaacactgttgggaacgaggttcaggaagagtttgtcataaggatacgaagtggaagggcattccccgccagagaaagcagcagcaggaggagcagacctaagatggaataatatgaacatatggcaaactataaatttcatggaagacttgaatgtgaagtgttggggaaaatgccaggtaggcaggacatatagccacaccctactacagagaatcattgtttctccttccttacacatttggtcttctaggcagtttatctcatgtacatggagagtgaatatgggttctgacttggccttgtacagccagttaatgacttccctggattccaacaccaaaagattcagtctctgaaactagttaatagataattggaaaaatgctgcaagcagttttctcaggatattcatactcaggatccaggttgtagctcctgttttgtgggtaacagccttgactttcatccttcaatccccaccaaacacacacagacagattttgatagataagccagtctccagtggcccactttatgcaatctagacacctaacagtctccttgtttccatctgaagctgatttttgttttttgatcggcactaccactctcaggcttggttgattggagaatttgtgatgcacacctgtcctcaattccagaatgctgggaaagtcattgacatgactttcttcagatgatttggtttgggccgtattaaattttgactatttcaccaccttctaatctagtacttagattcattccagcgttggaaggtatgtaattctgttgtgatattaaggtcactacagaatcagggcaaagaggagaaacacagaaaaatgaaaacaaaacacgcaggcttctaatgagaagtcgcatgatacagactttaaaagcatgggtttgtgagcaagacctggcttgaaattcctcttgttctacctcttattcgccatagagatgattgagcagttgacataactagtgacttagtttcgtcttccataaaatgtttttctacattattagcttactgtgatgaaaaaataggataatgcatgcaaagctccttttcccagtacgtggcacttaataagccctccgtgaatgttaactattattcttactttcatgatggtttgtaatcccaagaaaagataacaaccgtttttccttttggcttctttctttggttgttttattttgtttgtttgcttgttaagtgttcaatagatatttgctattttttaatataacagttgactgttcttacttttttgggaggtggatgtatgcaatgtattaaatatggtaaattttcagaatcgaagaaaaatgcttcgttataatacatcatggaatagcacacgtgtgatatcttaggtgttggaccacctgagaagtaaaggattatcctctacattttgaaaagttctgtgggtgaaaagaagaaggcatggccaaagaatccgaaattaatggattagttatctctcaaaaatggaatttagtttataaagttataattaataaaataattaataaattacccattgggacagaaagggaaaacatatgaaagacatatgtttatatcccaaaatgctctgacgaacttagatttgaaaagaaaagaccatgtcaggaatagtcacatgagggttacagatttttgtctttattatgatgtggtattttgtttggacctgagaattggtagtgatagattaacttaccaagtagtagatatttaatcaataaaaaatttttctaaataaaaaaatagtcgtctgaaacataatgggctttgttagtgggaggttgtttaggtcaatacaagataatcactggtgatgttgttttgctctgctgtgggaacaaataaattccaaagttgtagtgtcctcacagtaaaggagtttatttcttattcatgtagagttgctgtaggtctggtgactcttcacagcaatactcttccaagcgatacctgaaggatccacgctgttttcacctctgtctccaccatctaaacccacaggttccatggtcatctttgaagggcagagagagacaaaggagccccatcagttcttaattcttcatattggaaatgaagatttttatggtcatatttctgtttcctaataatatttatacttagctcccattctgtctatgaggaagtcttggaagtactattttcctgtgatataggaaacacctaacactctcggccactaaggatatttctcatgactggactataggacaatcctaaatctactgtcagaaattccgatgattaataatcagggtttgcaaaatttatcaaatgaatctttaactaaacaatgcctggaaaagagtgtttaaactggagaaatacacactacccacagttaaaatttagtgtctgcctgggtataaagaatgtattatatctggtaaacatccatccctagatacataagagcactaagaggcttctcttgtaaatctcctctgtgtgtataggtagttacacttgacatttgctttgcttgttcaaagctgtctctaatagctcagctaaggagataatatgtgagacaaatacatataaatcaatctcatatgcaagatatttctgtctctataaatgatcctgtactccttcttgccatctctaggagcttaattccttactccttcattgaattgtcctaaatcctgctggtactgcttccaaatgtctcttcagaggtagtttctttacaccattacaaatgatttttttctttaatgaaggccctcatatttcatcttcaaactaattaatgaactcatatatattccacttttttgtagcacctcttcttttgcagctgcagctgccaaaatcatacacctaaagctgaagacagtaaggaccattgtagttaagcctggacatcctggagtgagacaccctgtaaccttggacttttcttagcctttctccttagttttgtcatttcttaaatgagagataagagtatcttatgggcctaaaagaggaagataatgaaaatattatacattaaaacatcatggcacaaatgaactagaacggatgcaggccatagttggacaaatgccatacccttcattgctggatcatggaagcttctaggagtattcttgataaggaataaagaggcaaagtcatgaaggaggacacacttgcctaggttttggcagtggtcatttatcagcattacaggagcagtttagtaatttaatattagtgtgagctacctatcagctgaacatcagctttagtttagttaactctgtgaaaacactgaacacagtgtacagtcaaggctaggttaggaaatgctgaagtaacaaataaatccagatcttcaggtattaacaaaaattagtttattctagaatgatggatttagcttgggaacagagcctggagatttgtccatagctctaaagcacttctccctgaaggtggccccctttacttctgcacatattccattgaccaaagcaagtttcatggtcatcccatcattaaaagagtagagaagtactcagaagaggtgagttaggcatatcgaagagccagggtaatgtctaaatatatgatgtctagctcattgttaagtgctccagttattattaaagtgtattctgattttttcatttctcagttcaaattacgtttattggatctgctttacctccttataacacggaaactccttgttgtcgttgacactcattgtgatgtaaatcctaactacattcctgtttatatgttatactgcttcacttcattttacctttggtctgtccaagcagaattatttggttttctcatcaatgcattgtttttctctacatcactgcctctgatgtccctttaccattagtgctttaactgaatctctccatgccagtaagccttctaacatgtcaggttctcaagttcaaatgccctaaatttccattcctgatatcaacttctgtagtaatatattccgttaactcttattttgctgttagacccaacattatattatagtcatttttatatatgatgatgtagcattatagcctgaaaacttatgaagagtccatgcctgattcatcatgtagccccacttgtgagtaccttactcatagcagttcaataataatactaataataaaattcatcataatgttacatttagtggtggcatcagcctaatgtaaaatgagcattggattagatattttaaaacttctggattttatttgcaccccagttactaactagcagtattacctagaacaagctgcttaacctattggaatttcagttttctcaactctgaaatggatgagaaggaactttaactgattttccccttctgtcttacaatattgttgggagaaccaggtcagatatgagatcatagtatgtgaaagtattttacataaattgtcctcattctgatgtaccaaagctaaactctggttttaagtctacagtggattgattcttcagtagcatttaattctgtttcccattctgttttctccacggaatgcttcttagaaaacgttttgggtttcataacattttatctttctggttttctgcctatgtctcctttagctgaccagtacagctaacctttctctttatcccttctactctacactctttgctagataagttcattcataccataacataaattcccatctatgtacaaataactcacaaatatttatatcctgtcaaagatctctcatatgagtgataaatccaggttcttggttggtttctctacttggatatactaacatgtctcaagcatatcattgccaaaaccacactcttgattcacacttgccttcataagtcttgcaattttccagtgtttatttttttctgcaaatggcacaaccactttcttagttttaagtgttaaaatctaggttttctctttcttcatccacaatgccaaaagtactgacatgctgcaaaccttaccatgtgttcttattccattaatgagaatctaagccaaatccccaccctttcttataccttccaaggaaatactttcttaactggtatttctttccttcatcaatctattccctatactgaatcttttcaaaatgtaaatcctatgctattacttaaaatagttaccactgtttgggaataaaggttaaattccttaacctggccttaaagaccacatgcaatgtgttggcatctacttctgtagcctcatctcctgtcaaacataatgttctctctacaattttgtcttgcgaatactttccatagttgttatttttactatttgattgattagtcaattaaatatatatttttctcattggagactttgagtttcctgatggtagggagaggtgatcttttttatatctcacataacaagcactgtgctttgcagacctcaagtacttaataaatatttgttaaatgaataaagagtttagtaggtagacctgttttttaactgtgtattgagattgactttttaagaggtgcaataaaggcacaaaaaccataaatattaatgggcatgatttgaccttcaaggaaatcaagatctattggtaaatatgcttaaaaacagttaagattgaggggaaattttgcactaaggaagcagcaaatcttctcccggaacgtggtttgatatatagggcttgacagaagaagcttccgcttctgatctctgattttctggaggactcatatgtaaaatttctcaaacctttcagtattttctgttcaaagattataactgtctttcattgttatgtttccttcaatgtgacaggtctcagtgaccacacattcctcatatatatctcaaacctggaaaatttcagagtactcaacacattttcaactataaattccccttttctgtgcttttagatatctatttatctctagtttatgtgttgtatttttgttgtagcttgattatttctcctcgactcaatttattataaatgtttccatacataggtatatatattttagaaaatctattaatattttctctatgtcttctaggttttgtatcctgttaatgaaagcctgctctaaactcccttatttaattgttaaacatttgacatgaaaaaatcatccccttaacttataaataacttatattaatcaataagaaatatacaaataggccaatagaaactagacaagggattgaacaaaaaaggcagtagaaataataaataattttagagaaaaaatgttttccctcgcatttaaagacatacaaaacaaagcgatatgagttttgtaatctgttcaagttgataacaaatgtttcatctaggttatggagcagtatttattattatacatcactatttggagtgaaaagtagtacaaaaatttggtgaatacatcaacaatgtctgtcaaaatataaaagtacatatctttccttatcagccatactactgttgtgaatttactcaacagattattttcaaaagaatagcgagatacttctgcaggaatttctgttgtacaaccctttgaactatcaaacaaaaaatgttggaaacaagctacctatgcattaataggaatgtgattagataagtcatattgattcatccaaagaaaagtatgaagcagatcaaacagtttaaacaattgaagtggcatctgtgtgttcaagtggtaaccattaagaaacaaatatacaaaaagcccatggtgaataactagtgattactttgtataaataaaaatgtatatacaaatgtatgcaaaaatatacatgaaacaatttttcttgaaagatacattaaaaaaatgtatagacaatgaatacctttggggaggagtgcagttaggaagtaagggaggtaataactcttacttctcatttttttcatttcataactatccttgtactgttttaagtatttattacacagtatgtgtattactgtcatgttttttacaaaaataactgacattaaaccattttaatttctatgcttcacaaaaaatttctaaagctaaggattttaaaaattcttcctccttttgtggaagtgaattctatacttgaacatatttaatattgtataatgtatcctcttttctttgaactgtagccctcagcatttttttcagctcctcgtgtgttcttacttactgaatctatccttattaagctgctaattctgctatcaggaagttcttggtaagttcttggtatttaggattgtgcaacaaaaattgaagtcaactattttgtacaaaaaaaaaatcattattctacattaacagttgattttggaggtacttagtaaagtcgactcaatcatagacctccaaatggaacaaacacccttacttgcatttcattgtgatttttgcaggccctttgcagtaatagttctgaaaaacagtcagaaataaacaacttaaaccctcaaacatattttatatgctttgaatttaaagcactcatttaaaagaaaaattcaatcaggtggttttttttgtgtgtgtgtgtgcctacatttgtttaggtttcttcttttattttttatttttggcccttattcctctttcttttctactttcccagaaattctggtaaaagtaatgtaaaaaatgtgaatacctgatcagaggagttgcttaagaaatgtctcagctgaaaccagtactttagtaagagtgctagctgcttaacaagtcaagggtgtgaggagctatgaataaagagagaacattttgccatgaattattcagttaaccatgggatgctgttatctccacttcagtggcttttaattgcacatgtaagaattctgcttatctggcattcaatttgatgccaaggtgcagcttgctcaagcagggctggaggcaggaaatgaggatctcatcagacaagcagctgccattcacgaatgcattaaagaatatggcatagactagcagggaaggcagaagacagacacagataatggcaatggaaggatatgtgagaatatgtgacaagagattgtcttttccttttgatcttattgcacattgctgagtcttgagtgaaaagtcaaattgtgtgtgctacctaaatgtactgcattgcctttgttagagacccaaggttgacctctggagcaaagatgacaagttgctctttaaaccattctcttggaaaatctggtattctttcagtctaaatggagtcctgactcaattttgagattctgttggttttaatttttcaaagtttacttcagataagtttgtttatcaagataaataactttctcaaagcctttttcttatatcaaatttgcagaagagatatcttttggcacctgtgctgtaaatgtttcaaaacaatttacttataaaataccattttaaatattttcagaagatttcatttggaaccccttctccatttaaacctctccgcatagtatgtgattcctttatattattgcatacatccatttccaaattgaagtgcttatgcaacacatgagtttcatcagttaccatttgctgtgtgctgtgtagtgcataggagatgtagagattagaagtatccacagataaagcacccttaccttatggagttcaaaggctaaaatgaagatgtgcaacacaaatctgctggtctgcatggctgttgctgcatgggaagtttatgccagacaaaatggaagcacttttgagggtttgattacccaaggcttcctgggagaagggactggagaaactggaagagacctcaaaaaaggcttccttcagaagacaacatttatgaaatatgataggtttgtagacatttctaaatttggcgaaagaagaagtgcaggaatttcaattagtatagccattatggaaaacactatggaggttcctcaaatgttaaaaaatggaactacaatatgatccaaccaatccactgctaagcatatatccaaatgaaatgaaatcaaaataccaaaaagatacctgcactcccatgtttatggcagcactattcacaacagccaagatatgaactcaacctaagtgtccatcaatggatgaatggataaggaaaatgtggtcttattacacaataaaatactattcagccgtttaaaaaaaatgaaccatatcatttgcagcaacgtgggtgaaactggaggtcatataatgtcaagtgaaataagccaggcatacaaagacaaataccacatgctctctcttatatgtgggagctaaacaagtgaatctcatggaggtagagtagaatgatggttaccaaaggctgggaagcatagggcagaaggaataaagagacttgtttaatgggtacaaacatacagttagatggaaagaataagttctagtgtttggtagcacagtaaagtgactgcagttaacaatatagtgtatttttcaaaatagctagaagaaaagatttgaaatttgttcccaacacaaagaaattataaatgtttgaggtgacggatatcccaaatacacagattggatcataatgcattgtatacatgtatcaaaatatcacaagtacctcataaatgtttataattatgtatcaattaaaaaagaaaatgtggtatacatacataatgcaatactattcagccttacaaaagaagggatttgtgtcattttgataccatagataaacctaaagtttatgttaattgaagcatgttttacttaaacattatgtaaatgaaataagccaggcacagaaggatgaatatcgcacaatgtcatttacatgtgaaatttaaaaagtcaaattcttagaagcaaagagtagaatggtggttaccaggggctgagaggtgaggggattgtggagatgttggtcaatggacacaaaatttcagttagagagaaagaatgagttcaaaagatctattgtgcaacagggtgcctatagctaataattatgtattgtattctcaaaaattgcagagtggatagtgttatcaaaagaaataaaagctaagtatgagaggtaatacatatgttaattagctccacttagcattccacaatgcatacgtattttacaatatgttgtacacaagaaatatatacatttttcatctgttaaaaatagaaaacaaaaacaaatctgtaaggagaaaaagtttagtatcagaaattaaagaatactgaatttaatcataaaaatggcctctgaaagaaagttgataatcctgggggacagcataagaaaaaaagaagaaaaaaagaaagaataaaagatttagagctgtggtgacaagcttggagggttggaagaatagcaggttattaaattactttttgggacaatagggtgcacaaggcagaatggcaaacaatgtgtgaagagtgcacatggtgaggtgccaatttgtgaaatgaagtccatgtggatgttattctgaaggcagtgaagaaccagtgaataattttaagcaggagtgacgtgatcagatttgtgatgcagaacaattgttctgatgacatcgttcctttggcacagttgttgatggggctccactataaaaacgaacacaaaacaaacaaacaaacaaagaccacttcatattagcatttcctatggggccaaaaatcaaagggacaatatagattaattgaaacagcagatcatttgatatcagaagaattgggtcttgttttatgttcttccattttttagcaacataatttcggacaaagtatttctcctttcccattaggtttaagttcaacgtatgtcaagagcttaaaacaatttctcatgcatgagtgaagcttcataagtgtttggggaataaatgaatggatttctgggtctccgtattcttctactaagtaaggaggatcaaaaaaatgttctgagagtcatcttccactactttggaagtgactacaaagtgacacatgagattagaagttaagtgaacaacctatattgtatcccttcagggaaattatttttgtattaatattgttagtctggggaaagtatagtgggagaggagaaactatgaatcaattttcagacatctttttctcctctgttttgttttgtttttttaattttggcagtctcttctttcctgccttctcttttgctggatgtttttatattcctacattttaaatatcttacttccaaggatgcaatcctgggacaccttatctttttgcttactgggcatttctgtacatacttttcccccatgtacttcttttcccttatattccactgtgctttccttccttaaggtctcaaaaaaaaataattcctgctcccctcccctcctagacatctaatataatctttccaatgggcctgagcttttccaaaaggcaagcagaaccatttaattaggttgtgtttagtttctgcccagtgaaagtccctgaggaaaggaacacaaaagcaggctgtcacattgaaatatgtgagggttcatagttggggaaatatagaaaaaggaaatgcttataacttaatttattggattcagcatagttacttctttgatattgttttgaagaacttgatgtgctagacaactgccttttgtgttcaatctaccatctgaagtcctcacttctttactgtaattgctgaaaattctaacccccaggaaaggggacaaatttcctgaggattttatcttgtaaactcttgcagcaccagtccctagcccagtgtttgagacataataggtttgttagtaaataaacaaatgtctctaggcacatgctgatggcttatttttgcagaaggctgaagctgctgctcaggaatttgctcatcatcagcttccttctagtgacacctatatcttcaattgattctggactcttcatctcaaagcaatgagtgacttttatttgccagttctatgctttggttaatagttttccaacgttttattattttgttcctctaatttctactttttttggttgcagttattcaagagattgtgactaaatgctgcattcttagaaatttcttctctgaatcaacctctagtttgaaatgcaatatataattcccaacataccaagatcatgtgtcttattcctttagataaagtttactatcttaccttgtttcaaaattgtgagcatgacttttataataactctgcattttattacaggagggcaggtaccatgctgtgatcttcctatcctggggcctagcacagggcctaacagaagtcgtcaatatgtgtttcaattgaattaaattgaatgaagtgtaatttctactcaaaacttttatagttataggaataagaacaaattttacaaaaatcattgtaagttacaaattaacctaaaattacacagtcatatatatctagcaggagaatttagacaaattctatacaattaaaagtaaagttgaatatatcattgatatttaggtattatttttctgagaagagaagcttgatcatatcagaaggatccctacatttaagagaaaataatcccattgttttgttgcactagcttaaaaaaatctttctatgaccttgaactcggtaaacactgaaaaatgcaaagtgtttcctctcaagggcctcttttatggatgtttcatgaattttcgggatgatgctgttcatctatgttaatggattagaaggaccattgttctaaacagtgaaagataaatatacagtccctcataacagttttgacctaaacttttgtcatatttataggttttcttcctctcaacaatttattttctctcatggctttgttaaattaggtagttttattacaaaatttctttgcaagctttttaaaaagtctcaggaaactgatcacgacaaactctagtgaaagtctttatttccatggtaaccataatatgctctaagtatcttctcatgaagaggtagaaccaatgttaccagcaaaacacagacaaaggccaataaagaaggaacacacaaacacatgttcattacagcaatggtgatcagggctgcagtcaccctcctttcaatatttaattcattaacgcaagcagattttttaatagtataaaaacaaatggagaaaagtacaaaatatgcagtgacaatttttgatttagaataaaaaatgttaaatgccatttattgttaagttcttaattttgtaagaaaatattttctgacatctaggctaaaatatcaatgaaactcaagtttctctgatcattgatattttagcctagatgtcagaaaatattttctgttaaaaccccgatagtaaacaggtaagataagactctgaaagctatatggtttctgtgcggactacttggcaataagtaaacaaataagtattgctgtgttacaataaaactttattttaaaaaacaggtaatgtgccagaattgccccttgatctatagtttgccaatctcgtttattataaggtaaaggtagtattattcatattctacagatgagcaaatggaggttctgagaatttaaacagctcaaggtgaggcagaatcagaacacaaaccaagtctattgcattttaaagcctgactcctaaatagctacgcttatttaataagaatagctggcatacactggtgcctaatgggacaacagtgtgctaaattgtttatgtccattactttgcttaacttagaaaatccctgtgagataggtatgattagcattctctttttatatatgaagaacagatacttgggaaatctaagaagattttcgaaggtcaataaaatagtaactctatctttgttcaaattaacttattctacttaattcagtgactgaaataatgaaatcattttttaaatgtgacctctatgatctcaagaatataaaaaggaccatgcacatttaaagagtacctgagttctggtggatgctttgagatttgcaatgcttatttctcaatctgcagctttactttgattgtaacttggtttccattcagtctactttatgaggtgtaatttcatgaagaggcaaaaagggtaattgtagtgtgcagttaattagaatttctaattaaaatcatccttaaaaaaaacagccaatgccaatggaagaatgattactaatctgtaaattaaggaaactgtatactgcaagattttttttttctactggattgaaaaacacccagtttaagttaacatatcataaataaagataatcaccttaaataaaggtaaaatgcatagggcaataggttgatttaatttggccaaatgtaattcagttaaatactggggattctgtaactaacaactaatcttgcttcacttcccctccacagccttcaattccttctttctaatgtttgggcacagatttgattttctcaaataagggctcagtaaacctgtcaggctttcacaattccattcgtatgtctatacacaagcacacatgtgcgtttgcgtgtggttggcaagaacacatgtatgtgttaatgcatgcctgtgagtgtgtgtgtctgtgtgctctgtgacatatgggtaaaatttgtagcatcttgcttgatactcacaggttaacttcttgcttcaactccatgttgtagcaacaaacatttccccataatctcatttcaccaggtgtaggaaacttcaaactatcttaataacttaagaatctttctgaagtcatgcagaatctgttcattctgcatttgtggccatggttacataaaaaagtaatcattgggaaaaaatcttatttatctgtatagtaatagtcaaaattttgggtcaagctgtctctgaaaattatgctaagagctttgatagaatatcaatacagtcactccttggtatctgcagtatctgtgagggattggttccaagatccccaaggataccaaaatctaaggatgctcaagtcacttttataaaatggcataatatttattataacctatgcacctcatcccatttatatatctctagattacttataatacctactacaatataaatgctagctgaatagttgttatacttcattatttattggtattattattttctatgtgtgcttgtttgaatccacttatataaaatctgtagatatgaaagcctactgcatcatgtttactttttagcatgctaaatatgtaaatatctttttgaaaattaataaactgtatattttcgagcagttttagatttacagaaaagttgagcccaaatacagagttcctatataatcactccccccccacagtttccactattattaacactttttacaattgaagaacaaatatggaaatattattattaactgaagtccgtagtttccattagtgctcactctttgtgttctttgggttttgacaaacacatgatgtcatgtatccaccatcagagtataacacagaatactcacatttccttgaaaatcttctgtctttcatctattcatccctccatcctcccctggttcctggcaactactgatattttttactgtctctatagttttgccctttctaaaatgtcatatagttgggatcaaacaatacgcagtctttttgggcttatttttatcacttaatgatatgcatttaggattctctacctttttttcatggcttcataggttattcctttttagctctgagtattatccaattgtatggatgtaccatagattgtttattcttgtttatttattatttgcagttcttctattgaaggatatcttggttacttccaagtgctggcagttatgaataaagctgttagaaacatttgtatgtaagtttgtaagtttgtgtgtgtgtgtgtgtgtgtgtgtgtgtgtgtgtgtacataacttttcaactcatttgagtcagcacctaggagcttgattgctgacagtaagagtatatttagttttataagtaactcccaaactgtctctcaaagtggttgtaccatttacattcccaccacaatgaatgagagttcctgttgcactatatgcttgccagcctttgttgtctatgttttggattttgatcatctaataagtgtatagtggtatctcattttgcaattcactaatgacatgtgatgttgggtatattttcataggcttatttgccatctgtatatctcctttggagaggtatttgtttagatcatttcccactttttaattaggttgtttctttacttattgttcagtttaaaaaattccttatatatttttcatacaagttctttctcagacagatacgtgttttgcaaatattttctcccagtgtgtggtttgtcacttagttttcttaatggtattcttcacagagcagaagttttaaattttaattgatttaaacttaattgataagtcccacaccaatttttttctttcatagatggtacttcatataaaattaattgcccaaaattatagagatagaaagtagaatgatagttactagaatatgtgtggggatgaggagaatgggaaattattgttctatgggtatagagtttcagttttataaaatgaaaagaattgtggagataaatgttggtgatggttgctcaatgttattattgtatttaatgcaatagtacaacattttaaagtgtacacttaaaaatgtttaagatggcaaattttgtgttatgtgtattttaccaccaaaaaatttggaaaaaacttcttcccaaacccaaggtaacctagattttttttccttgttatcttatagaagttttatacagttttatattttacacttagatctatgatctattttgacccaatttttgtgaacaatgtaaggtccgtgtttagatacactttttttgcatagagatgttcagttgttcagacacatatattaactttttgtttgcttctttattgatatttatagtatcgaatcaatatttccaaaataagaagctcatcaaatgcctgtgttttagggttcttctttgccatttccttattgctaggaattcagcatctaggcactcatttgaatggatttgtttgaatatttatactcgtcagcaaaaaaattcccttttcagtcttagttgctttggctgctacgaacagggtggattcttttgagtatatgagagtatttgaggtcatggatagaagagcttcattattcaaattccatatcatcagaaaaatggggaaataaaatgggaggtaaggatacatatctcttattaagtagctttgggagatgtcagaatataccacatgtaaacttctgttttcacaaagggcagggggatgagtgagcacagggacctgccacagtttctcctatgtagcttctgatcatttctgttaaatggtatggctcccttcttgcactattctttaagtcttctcagttagatcattcttggacatctgttcagcttaaaaatcagatgttctggggaaaatacttggccaggtttgtaacaatttcatcagagatagtgctgtttttaaaggtaattacaacatatatctgcatctggacaaggaccaaaaaagaatgcagaagagggaaaaatatctatatgtgttgtgtgtgtgtgtgtgtgtgtgtgtgtgtgtgtgtgttttatacacatatacacatgaacacacataaatgtttagtttcctcttctttcctaacttgaaactatttatgacaaaatagtttacatttatatagcatcatggtcaaagtgctttacatttaataatttatttaatccaaagtggaaagaagctcccttttttaaattaacatcaaagcagtttattttcagggtgggaattcaaatatttgagcatactttttacttggcaagtcattttctcccctaggacagataagaggctattaaatctagcacagcagactgagaattcagcaaatcaaatgacagataaggaattgaaatatgagctgcatatcaaattctgaatttaggcagtttggagaaagaaatgtttcaatggttttaatgggaatttgtgttttaaaagggtgtgttcaagaaatactgggaagaggattaaaaaatagtgacaaaaataggtgaggaagaaaagcacatgattgaacattagaagtaaatgcctaaaatatctgtacttctcagttttacaaaacaatcaatagtaaggtgatatgagaacattctcctttagctcttgctctattaaaaaaataatactgattcagtaacagtctaaatcccaagtgaattttctccactaatgccataaataactcacttcctgcaggcacatcatttttcactgttgaaaattaaaattgttaagtagagtattggcaagagagaaaataagccaagctttcataccttgttcttgttgcttctatatttacgtgtgactgaatttggttggatcttaagtatttggtactgtgtttgtcataactacttgtaaacctatgtcttctagtttagctttaaacattacgcttgtgatttctataaaaaccttcatgttttacaagaaatgaaatgtgttattttatattattttgcctgtgacatggaactcccaagtatggttatttttggtccataagcatgctactcatacagttccacaggaccccatgctaaaaagggccttccactcggttgagtgctctgccatcactattaatttttgaacaagggcctctacattttcattttgtactgagcctttcaaatcacatagctggtctggtatgtttgaataagaagttcagtaacaaatagaccaaagtctcaatctcacccctgggccttgcagccaaatgaacatggaaaagctaattggcactagtgagcctattctacccttatttataacccttatttataaaataaggattaaaactgtctctctcaaaaggctataatgggaattgaaaaaataaaacatttaaagagcctcacaaataaggcaaatacgtttttgttgttgttgatgtttcatttgaatttatttattttttgagatggtgtcttgctctgttgcccaggctggagcgcagtggtgtgatctcagctcactgcaacctctgcctcctgggttcaagcgattctctcacctcagcctctggagtagctgggattacaggagtgtgctgccacaccccaccaattttgtatttttagtagagacagggtttcatcttgttggccatgctggtcttgaatttgtgacctcaggtgatccacctacctcagcctcccaaagtgctgggattacaggcatgagccactgcacctggcctgttttgtttttaatctcaggagccaactccattaaatttgggtggcttcctggtaaacttcagccagaaaagctaacgctaaattcttatctaggcaatagatattaatgtgtataaattaagccacaaattattgggttcatgagtaaaaccttactttgaaaaactctagcttgaactttgcaatcctcactttcctttgggaatgaatatttttatttttccacattctctcctgttattagggcatcaatgttagttcataattgttgcctttttttctgcttaagtgatctcctatcttaataatcaaaacataatttgttactttggagaagggcactcaggtgaaaaatgagaatgcagatataagcatgatgctttgacagaacgccagccattgtcttttagcattggtttcttatgaacaatatttctgtgctatgactggcctcatttgaaggtatgttctgtatgggaggtgaaggacacagtgcttttggctgcagaaatctggagagttggcacagggttttaaatgagggatcaagatttactggaggatctcttccccaagcaattgttgttgctgttgttgttgttgttgtttgtcattgtcttttttggggggggaacggggggagttttggctgtatgggtgagtataattaataaaaatgcgtcgaagactgcaaataaatgagtttatgagagggaagaatgtgcaggtaattgtgtaggctagcccagagatatacccagctctgctctcaactcataaggttttttttttaatcttaattacttttccaaataagcctttctaattgaaaaagtattcttcaacaagaataattaaaactatggaacatgaaagatgggtaattagttagctcattcatatcaattgacagatgaataaactgaggtcatacaatttttagtggactaatgaaaataagcagaaagtataacctatctgaactctaagtctgtgtgagtttaggttcatgaacgagtttccccagaacttaatcaactgtgcactaaataacatagacttttagttctggagggcagaaccagccttgagagttttgttaactacagatttttactgtacactgtcctagtcacagaccacccacccctcttctccggctacacagtagttacctcctcctcatgtgggcctgccagatccactgcagattcttaaatagccattgctgtaccaaatgaaattctatctgagaacctgttttgagggtattatttcttctctacaaccttgtggccatctcacctacactctctaagcctcaattattcatctgtaaatttagcataatgataattatctctgctcagcctccttcaaagcactgaattaatggaaagcttagaaaacatacactgaagcactttttagtgtgctctatcaattgaatattatagtgttcatattggctttttataataggtatactactattattgatattaacacaataatgtgttcaaactattgaaataggattacttaaaaactgcgttaatattcaatagcttaaatctgaattgtaattacttttagaactttatacactaagtgatttctaaagtgactaaaatagggaagaatatttcttgttttgaaggagcataatgatttgcaaatcatggatgataggttcaaagaaaaataattggttgaaaaacaaactgttgggtaccatgctcactatctgggtgacaggatcattcatactgcaaacctcagcatcatgcaatatgcccatgtaacaaacttgaacttgtacccctaaatctaaaataaaagttgaaattattaaaaaaaaaaaaaacaagaaaacgaaacaaagctaaactgagaaatatttaggaatatgtttattatccttgggagaagacaaggagaagctgttggctgtttgatgctctaacaaaattttcatcaaaaccgtattcccaaaatggccttgaaaggcaactacattgactgtcaatgataacagcaggattggacagcatggttgttggttacttacagtctggaaccagaatgcctgagtttaattgctggttatgccacttatcatgaaatattaagcaaaatacttggcttctctgtggtttaatttcctcagttataaaatgaggataatctaattgggttgttataatgagtaaatgtgaaaatattgcttagaacagtacttggtgttttaagtatttattaaatatatttcttaactggtgatcaattagattctattcaccatctttattttatcttgtgtttagttgcttttgaaattagaaaaataaatcaagtagcatgtcatcatatctatacaatacatattttttaaaatgtggacatcattcaaatgctcaggcttgtagaatttatgtatattgttaacaattttaatgattttgaatgtaatcaaaaagatattttgaagaggaaatggattggataattgtgatctgttgattttttcatgctaaaaaatcatgttttttcatgtttttcatgttttcatgttttttaaatgatactgaaatctttgcattaggacaatgtttctcaaaatgtgacccaggaacccctcaggtgtccatgcctatttcagagggttcacaaggtcaaaactattaacaaaataatactaagatgtgatttgccttattcatgctcattgtctcacaagtatatcatatttttccaagattacatgacctatagtattacaaaagttgaatgcagacacagatctgagaactcaactgtcttccattaaaatagtcattaaggatattcattaaattgtaaaacaacaccactctcgttaattttattttgtttttgaaaatgtatttttataaaagtatatgctattcatataaacatgatgtgttagtactatacattttaatgaagtaatacataaatatttttaattttcaaaattttaattctttagattaattattaatagatataactggcttaaacaaaagctccttggcatccccagtaagttttaagaatgtaaaggggtcctggaaaaaaaattaaaattactgcattagactatctgtagtctcttagaaattcatcttgggcaagtggtttaatggagttgcacaagtctgtggaacaaccaagaggtaggcccaacatcatccaggctctccagcccaatcttctctggatgaatggaacaactagcttctgtgtgttgtttctttcagttctagagccgctgatatgacagatggacaggccatgaatcagagagcacaggggttctctgtttagagtcagtaaaaacatgaatttgagtgacatttttcaaccagagctcctgatatttggaagctggcagcaatacatatttaaaacagtatgtaggcacagagagaaagtaatgtgaaagtgtaaatagtcgatgtgatgatactcagagatttaaaaattatatttccattttgaggaaagtagtttttttgtgttgttttacaagattgaattgctacataattttacaagtcatatacatgtgtttatatacatttgatagttcactataattgcaaaaattaatttagcttcccttggaattgagagctgctgggttcaaaatttggcagacaagtacaagtgagcacaggcctacccaggacctcctggttccaaagtgagcacaggcctacccaggacctcctggttccatccttttcccagctgatatggtttggatatttgacccctctaagtctcatgttgaaatgtaatccccagagttggaggtagggcctggtgggaggtttttggatcatagggagcaccatcctcttgatgatgagtgagtttttgctttagtagttcatgtgaaatctggttgtttaaatgagggtggcaccttacgcctcctgcctccttctcttgcccctgctcttaccatatgacatgcttgctccccctttgccttcctccatgattagaagcttcctgaggctctcaccagaagcagatgctggagccatggttgtacagcctgcagaactgtgaaccaattgaaccttttttttttcttttttgagatggagtctcgctctgtcgcccaggctggagtgcagtgggacaatctcggcttactgcaagctccgcctcccgggttcaagcaattctcctgcctcagcctcccgagtagctgggaccacaggtgcccaacaccacgcccagctaatttttgtgtttttagtagagatggggtttcactgtgttagccaggatggtcttgatctcccgacctcatgatctgcccacctcggcctcccaaagtgttgggattacaggcgtgagccaccgcacccagcctaaaccccttttctttataaattacccatcctcaggtatttctttatagcaacaaaaaatggcctaatacatcaaatttctaatattagcaaggaaccattcccgcagagttggcccagtttcccagagccattccctcattcaggctgtctcatatttggttatattagcctcagatgttgaccagtaattaagcttatatttggttctactctttacaacatggggattgctggcctacgcattgcaagggagactcacctcctctctgcgttaccccagtgctttcttagcacccagactctctgtcagtctcccttaactctgttctctcccagatcctgcttggaaaattgccgctgttcatatcaattatttttcagaaaccatggatgcattaccaaaatgtagataagaaatggtaacgaaagcacaacccaaggcattcattatgaggttagacagaacctctttctttggatgctaaagcaggcacctgggaaaaacaaaataccaacccaaaccctgaagaaatgtcactaattaattgaaggtgtatcactcaattcagaattgagacatctccagctgcattttcaaccagatgttctttcaggcatgtagtgtcactactagagagaaacttcaacagtcctgattctcataatgagtctattgaaatatcaggtgggaagccttccaggtgtgagatcacattgctaaaaaactggtaatgaggggcaattctgcttcatttcaatatttatatagcttgttaagggaactttctactaaagacacccctcggagtctaaaaaaaaatgcattaagtaggtggacaggggctttgattttccctccctttgaggggaggtaaatgcatagttccacaagcttagaatacaatgaatcaggtaactgagataatattatcttctgcactcacactaccacaggattcactttttcatgtatcatatatttgcaatttcccattgactagggtaattggcaattcctgtgagctaacttaaaaatctgtttttctctttaactaaaacatagtataaaatcaggatcaaatatctgttctgcaactgtggaaatggcttatttccagaaatgtttaggatgtataatagtttgtacccagatgtagttatagaacagtcactgaaaaatggttgttttcttgcatattatttcaacctcccacccatgttaattgccagtgacattttgggttgtttttcaatactttaatgagaactaaagcttctgaaggagtcttgctgtatctaccatctgattgaatttgatgtcccaattattgatgtctttgccagtctgtgaaggaaacccaacctccaatgggtgaagtagcagctaggttaggcagatattttatttaatttttagctctagcaaaacttaacggtaatgatcaagaatcttgtaagtatgaagtattaatcttgaataggcatgtttgtacagagttcatgtctctgtatctgaagacattagcccctagggtaatttattatgagacacactgaaatttaagttgtataaaaacaagttatcggaggaagctaagaaggcccctaggtggagcagaggtactaaaccctcagcttgataaatactgaggagggaaggtcattacaataaatattgcctactcaaaatgtgatccatggacctgtaggatgctgtagcattggcttctaccacgggcttgttagaactgaatctcagtccccctgctccccacagacctactgaaccagtttaacacattacccataagatttatatagatgctgcaaaactccattaacaaggggttgtggtgcacctgtgctcagcttgggctgtagagtaccagctggcatgataagtgaggcagctgggattctgattctgacactgttgatgctcaacatcaggtagggaccaggttggtgtgccacctagatcttgcagtttggaaccaaagatttcaatgaattgccaaggtgttgggtgcaaaggaagtcagtatcaaagaaagagaggttccatccatgtaggggccacactatggccaagaacgctgtcaggctttagttcattaaattcagggctacagaccaagatgaatgagtcattgcccattccatcaagacatcaggtgattaaaacatcaagataaaaatggcctcaagacccatccacacaacatgggttaaggcaagagtcctggggtttccctgaggcacatcagctgtcagtcttggggaccacatttcatattcttttcactagtgggaaagggtttctcaggttctcctgagcatacggcccgggtgacgggcttccattgagttcttaaagcctagaagacaaggattaatgtcccaacctattcagtttaaagtggaggagtgcagcaaactcaatccaaaaaataatatccctaagaaacagtactttttgaaggataggcatcccaaattgatattttcatgaatgaaatggggaaaaaatgataatgatacaaaatactaatgcaactgtgcggtttaagtgcagtcaaacttggcaggatcccatgataaacattcatagttttaatggcatctaaactgtagtaacaatcaacgagttagtaaagcttgaaattagtaaactcaatttgattcagagtttgtggtgagcaattctaatacttgtgtgttcttaaggaattacctttgaattttttcttttaaatatgtcaaggtcttaatagtattgactttctttgactgtattatctctttgaacccttgcgtcaacactgttaaataaataatcttagccttatgtttaaaattaggcttagagaggttaagtaactttcccaaggccattcagtaaagtacaactcacaaaaaccttctgaaaattttccaattgactctgtctactattccccaaggattttgaatctcattacttaggcctttgtgagttatcaaatcttttaagcaaaaaggttttctttcttcagtcacttattcattcagttacttctatcttacagggcctggggacctgtaggtaaaaaattgtcacaaaacaatgtttctttagctttgatcccattctgcagagaactctagtttttctccagtgccaacaaagcatttctgggaaacaccagaggttttatcctttgtattctgaatgaatcccatttgctaccacagattgtgtgacatttctttccttttatgcttaggttttctgtggtcactgtggattaataaggataaacaaaacttccaaaataaatacaaacaaacatgtaatggctcagtgaaacataagattatttatttctccctaatatagttcagagagcttccaggtaaagcagtgggcaggaagataggggttctctccacatttattaagggattctggatgatgtcagttttgccatctttaatgtgtgatttttaaggtcttcctgagggtcaccagtccaatcggctaaaagaagagaatatgaattgagtacatgtggggaggttttctggggccaggcctggaaatggtacagaggatgtcctcttacatttcactggctagatctcagtcacatggcaaacaatttctaggcaggcaaagaaatatggtttgccttgtgcataagaagaggaggaaatgcatttttcgtgggtagcttgtactctcagtgagactactcatgtgccaaatggaagccatggtaccagcacatagcagaggcagtcactgccactgctcatgtttataagatcatttcccctgctgacagtcatcagccaagactagaatgcccacattcaatgaaaatgtgaccctcatgcagctatctatgctgctgactccatgcctctaccatgttcagctgagcttgtggagattggaggaaatagacgattaaatgttcactgctgttttactaaagaccccttgcctggacatatatctaaatgtgtatatgttgagggattgtcagctgggacaggggtttaaacccataaaagtgttctgtgttgtcctccaaatcatgcttcctttctaatgcttgggtgaagcagctttggctcagacttagacacttgcttaatatcttctaggtacttgaagagcttatggcccaatgggactaactgatgcatatacaaaaaattacacaatcaaatctcaatttcctactgtttattcttcctttgttaatttctcactctcttagtttatttgaattctgctaccagtttgtctgtcccttccctttgaccctgttgtttgcactgttcttagagtcaagatttcagtgtcatgataaaggaccagctcatcacataataagagttgtaagagtagtgacccaagaacatataagggggaagttctctactgaagggtctgtgaaaatttgttgccccatggggctggaccaaagccttgctattgatcttactgaacaggtcactgttggtcaggaatgtgataaaaaggctgcagttaataccaacaaacaaatattatttgtaacatgagctcttgagattatggtagaaatgtcacagtctgtatttgcatttgattataggagctacctttatttataaagaagcatgctgtagtgagaattctttgctaggagtcagaattgggttcaagttactattgaccacacttccagtatgacctcaaagccattaattaacatttctcggctcatttttttttctgttaagatgttgaaataacacctacttcacaggcttaatttaagaatgaaatgtgataatatatacaaaacacttagcatagtgatccattatgatctctgttattactatcaataatttggaaaaaatagatacctacttttaagaaataccttcatttttgttttttattagccatgtaaataaaactatcaggtattaaatattacatactgacatatattgaacatatatgtctgttttaatacatatatatttctttaatatatatgtgtatatatatagttctttgtttatttttagtactgatgattctattataaaagttgtagacatttcatttacaagtcattttagacctttaaaagaatattttttaagaatgtgtaaaagccagactttctttgactagatgacttttattctagaactgatttttgttttatgtcagactcaggacacatttgatttatccttaggttgttttctgaggctttaaagtatcagagctgagtggaaaaatacttcttggaaaactgattttccaactaagaaactcagagtgatggattgctagaataatggctgtaatatatactgagaatacaaaggagatatgtagtctcttcaagatgaatttgggttcataagaagtgagtctgtgttttattatctttctgcatataagaaaactcagactatatcatttctgcacaaattcatggtagcccctgtctagcctatccagttttaatatggaacaataaataatataaagaatatcatggtaataagttttttgtgttctctaatccagaaaggcattgttgccataacaagttttgtaattattggagaaaagtacaaggatttctcaaaaatcatttaaatggtaacatttaaatgttaagcactgctaagatgaacctaaaacaaatatttaaatatctctattgttaatggttattttaaaaaaatttctcatccacactactggtgcttatagatactatagccacaaaataggtaatactaccattatgctaatctctttgaatacattagtttattgaatattttttatcttttacaattatttcctacatctagcaaagatgtctagattctagctgtagcctcttgcctctttctccattcctgggtcttacttatatacaatttctcttcccatggccctcagaaatttttttttagacccctgcatgttcttactttctggctgcatctgctcttatatctttttttaaataaggtgcctttggaccctaccatggtatcatggtcatcgcctctcaaaaaaaaaatctgcatttgatgtctttgacaatagaagaatgattgtatgaaatgaatatccaatttatttttctttttttcattttcctttttatttatttatttttattttttagagatggggtcttgctatgttgacaaggctggtctcaaactcctggcctcaagtgatcctcccatttcagcctcccaaagtgctgggattccagatttgatccaccatgccccacccaatttatttctcatgattccaaagtttatgcatagatgctttagctgaacaatagttccttctaattgaaaagaaagcctctaactcagctgacatggaacagtctcctgcatgtagtgaacttactcactacagagggattgatgctttcagagaatgacttaaactatgacatgctgtgatgagtatatcctcaagctactacgacatgtttattaacctctgttacccaattaggtgcaacattgatcagaacctgacttcaatagttttgatacttagtcttttagctctgactgctttagagtataaggtccttgaagataggattaccaccttataaaacagagttgcacaacatagcatgttagaaataggttggggccaggcgcgatggcccacacctgtaatcccagcactttgggaggccgaggcaggtggatcacaaggtcaggagatcaagaccatgctggccaacatggtgaaactctgtctctactaaaatacaaaaagattagccaggcacggtggtgggcgcctgtagtcccagctactcgggaggttgaggcaggagagtcgcttgaacccgggaggcagaggttgcagtgagccgagatcatgccattgcactccagtctggtgacagagtgagactgtgtctcaaaaaaaaaaaaatagattggaacttttagtcatattcgttcagcttgaattctagttcactagttgtttgcttttgggcaattcatttaactgctattagactagccaactagggacagtttttgttccttaagtttccaaatggttgagaggctcaaatgagaaaatagtgccaatacagttcattaattttatgattgtttctggcatagaaggaaatgaaatatttaataaataaacctatgagtgaattgatgaattaatgagtggtattcaaattatacttttaaatgtatgtttaaatacatgtggcatcccatttcctaggcctaaatataatgaacatgcttgcttgcaaaaggagccttttgctaacttcccagagagtctcatacaatcagtcagagacaaagacccggtagccgcttcaggagcctcgcatagcaagtgattcctgttgttccactttgtgcttaaagcatgagaagttgggccagagtagaattggaaatggaggacctgtaggccaggctttgcttttaggggacttgtgattggcaattcgttgcagataataatgagaagaaggcagaagattttaatgaggcacgcatgtgagaacctcagagactctgggtaacttcggtgtctgcaaagtggctactccctgtttctcaagataagaggggaaggtttttccatttcaaactggttgggctcattttggtcaggaagagtcttggatggagaaaaaattccagccctgaggaaaaggcattcagcagtccctggtagtaaggtaagggttggtagcttaatcaactataggccacacagaacaacaacaaaaaaggggctttagcggtatgtttttacctagtaaaagaaataatttcacttctcctctctaccactctctttaaaaactcatcctcacaggtgtatgtaagacaatctgagagtggaggccagtgttttgcagtgcaaatccggcagtatggcttgctttgagaagtctatggcaatgctccaagggaaaagactgcaaaagtcaaaatataaatatattcagtgacttcagatcccattgtttccaggtcccttttgctttttccaattacctgtctcatttttgaggaaactttgcagtgcttttccttttattgtcattcttccccccaccctgtggtttttctaacacctgcactgcatcatccttcaagacccttttggctttgtttctgtgcatgattatctccccttctccctccttaccatatgcgttttaacaaaaccaattttcagtattgagttgaaaaaccctaatttaaagaagtaaaagagatcttcccaaattttaagcaaccgtaaagaaccagctggaaatgtatacatgtgtgtatgtttgcatgtgggggagcagtgaggatgatctctagagatagattagatataggaaggatttggcaatatacatgaggttagcgtgagaggaaggtaagtttaaatttacagtagatagccatttccaaggatgtattagaacaaatgcagaatttcagaggaaagaacagataattatttcacggcccttgaaactccttgcacatttctagcttgtaaagagaatgcagattagctttttatccatacagtaccttcatctatcaaatatttctgtctttataaacctacaaattacatacatacaggtctgggcttctgggtgaattagaagcaggggcaggtttcctcataaaacctaactttgtcaccaatttcatgtaatttgctactaaactgtgcttcttttgctttttatctctcttcttatgtgctcttaaaagctacttgctggccgggagcagttgctcatgcctgtaatcccagcactttgggaggccgaggcgggtggatcacgaggtcattagatggagaccatcctggccaacatggtgaaaccccgtctctacgaaaaacacaaaaattagctgggcatggtggcatgtgcctgtagtcctagctactagggaggccgaggcaggagaattgcttgaaccagggagtcggtggttgcagtgagccgagatcgcgccattgcactccagcctggtgacagggcgagactccctctcaaaaaaaaaaaaaaaagctaacttgctttaatctatgaccgtgaccttacaatgtactttataatgcatgtaccttgatgataacatgtgatttgtgatctttctaggctgacaaatgaatctcctagagctctgctgtgttgctacagtggtctgagtcattgtgattagaaattatttaaattcatcatttttatagacaggcctgaacaacctagcagagtttttttaaaaaaattttactcaaaattaaatatcttattttgaaaactgtccttgtactataatagctagcagacgcttcaaatatttctctttcatgtagacaaatctatacatttctcctcagagaatatagatgtcaatgcctgcagataagcaatccaaataagtttaatggaaggcagttttatgtaattaagttgtgacacttttctgtgtggaggaaggcttaaaaggaaggaaaacaagccacaaatgggagaagggcaatatgcacacgaaggttgtgcctgtggaattgaacattccttatctatcctttggttcttcaaatagttcatatctcttggacacatgacattgagaagtctggtaaaaaagataaagcctgccatagagtagcaagagaaccaagcaaatgtaatgtcacagaagccaagaggagacaatttcaccatggagggatagaaggatggagtgattgtctatatcaaattatgcttagaaaaaagataagaacaggtaagtgaccctttgctttgtgaaatactgtctctggtgactttgataagagcccttttattggagtggtgagtatgaaagtccagttgaaaatgatgagaagaggccgggcactgttgctcactcctgtaatcccagcactttgggaggccaaggcaggcggatcacctaaggtcaggagttcaagaccagtctggccaacatggccaaatcctgtctctactaaaaatataaaaattagctgggcatggtggcgcacacctgtaatcccagctgctcgggagcctgaggcaggagaattgcttgaacacaggaggtggaggttgcagtgagccgagatcataccactgcaccccagcctgggcaacaaagggagactccatctcaaaaaagaaaaaaaagaagaaagaaaatgatgagaagaagaaaactgaaggtcagtaggtatggcagtgagtataatcaaattagtcagggatttttttctgagaataattgagaactaaaatagtggctacagaaggagacaaggccagttatacatatgggaggacaaaagtgaatatgtgggcttcaaaaggaatacacatttatttttcattttaatattagaaaaataggtagagataaatgcaagttggtggaacttgtggtggaaaggtgaggctcttttcttagtcatggatgcagctacgtcattagcagagaggagaccaaatagcagctggagatttgaagaggggatgagtgatggaattgtcatctcagagagttttaacgttcaaaccaagtataaagtacattaggtacaaaggcagtagacataaatttgtaaataagaatacttagagactataaagaactaatcaggccgggcgccggggctcacgcctgtaatctcagcactttgggagaccgaggcaagtgtatcattgagttcaggagtttgagaccaacctagccaacatggtgaaaccccgtctctattaaaaatacaaaaaatagtcgggcgtggtggtgttgcacgcctgtaatcccagctacttgggaggctgaggcatgagaatcacttgaacccaggaggtggaggttgcagtgagatgagatcatgccactgaactccagcctcggcttcagggagagattgtctcaaaacaaaacaaaacaaatcaaaataaagtgaaacaaaacaaaagaatgaatcaatccaaaccagaaatgacatggaaagtagtggtattagaatgatattaagcatcagttccttttaaatgtagaactaaaatatctcagagctgtccaatgtaatatgaaaatgctctctgcattctctacttataatacttaaaaaaatagtgatattcaggtgtcctctgatgattaccatatttctgtttacatgatctaattgattgttaagcatctagtataaatttgttgaaatttttgacttgtggatggcatacttcccttattcccagcacagatagagggcttgtcttatttttaagtgcctttgcctgtttcaatagctgtaagtatcagggggaaatgaacacagctagaaatctgcactcaagtgttcatcctgccagtagttgtcatttaaatcaatgattagattttatcttattgacgacacatattaacatgtataaattctgaaaaaaaatgtaataattacaatttccttaccctatttcaaacagctgaattgttttaatatactattatagtcctttttttggaatatattgtattgtatagttagacaaatttgaattataaataaaccagtatcttatttatttatttgctattttttgagacggagtctcgctctgtcaccctggctggagtacaatggtgcgatctcagcgcattgcaacccctgcctcccaggttcaagtgattctcctgcttagcctcccaagtagctgagattacaggcatgcaccaccacactgggctaatttttgtatttttagtagagatggggtttcaccatgttggccaggctggtctcgaactcctgacctcgtgatcctttcaccttagcctcccaaagtgctggaattacaggcctgagccactgtgcctggccatatctcatttatttttattttttttaatttttattttagatttatggggtacgtgtgcaggtttatcacaagagtataattgtgtgacactgaggtttgagcttctactgatcccatcaccaatatagtgaacatagaacccaataggaagtttttcagccgttaccccacatctgcctcccaccccttttggagtctccagtgtctgttgttcccatctttatgtccatgtgtacccaaagtttagctcacccttataaacaagaacacacactatttggttttctgtttctatgtcagttcacttaggacaataaccttcagctgcatccatgttgctgcaaaagatatgattttattcttttttatggctgtgtagtgttccatggtacatatgtaccacattgttttcattcaacccaccattgatgggcacctaggttgattgtatgactttgctattgtgaatagtactgtgatgaatatgctagtgctgatatctttttggtaaaatgatttagttaacattgtgtcatcagtattctgagtttgttcatacacttagtaatcactactgatatttgtaatgttgaatataggtttccaatttgtggctatcacaaaaattccaaaatgaatgttttcaggcaaataactttttcatgttggcattgttctttggttagatttttcttttcagaattgggagtactgaatcaaatggcatgactattgtcatgcttttaatgtattttttcaaagtgttctccaaaagctttgccatcttacctctactggcaatctattagaatcttaattttattatatcaatatcagaattggacatttggatgtatctgttggatatacaaggtattcatttcatctttgtccttaatttctcggtggaccttcccactgtctgctactgtaagaaatgcattttttaaagtatggtagatagagtgtggtggctcacacatgtaatcctagcactttgggaggtcgaggcggaaggatcacttgaagtcaggagtttcagaccagcctgggcaacacagtaagacaaccatctctgctaaaaaaaaaaattatttatatatatataactatatatacaaatatatatatataactatatatatataaaactatatatatatagttaactaggcttggtggtgcatgcctatagtcctaactattctaggagcaaagatgggagggttgctcaaatccaggagttggaagctgcagtgagctatgatcatgccactgcactccagtatgggtgacagagtgaagccctgtctctaaaaaataaataaacaataaaaaataaagtggtttgaacttagtatatgcaattctttttaggcattttgttattaaccaaggattaaatgtctagtccacagtcgactatccgttttttgaaattttcccattaatatgtttcttctctggcctactgggtttgcaaagagatttgtggtaatgattctatgcctgcattcttgatatcatgttctgtatcccatgcttgtttaatattcttactggaggtcaaggaatagcataaatttcttatcacatcacagtataatgctgttaatttcagggaagatgtaacatactaactgttaaagaatgatcctctacttatagtatgagtggaaattcttatacatagattatatttattaaattattatattattttcaatatactcttagctttgaagataagtaaaactcaattaagacctagactccaccacttcctagcttaaatagatatttgtaaaattatccaagccaggaaaaatgaaaatatgaaaatgtatgaaatacaaaatctatgtccacctaatatgtttttttgagaattgaatgagatcatatatgaagacccaagcgcagttcctggacacaataagtgctcaataactattagttatctggctctccattctcttgataagaaatggacaaggccattctcatatcacaattctgggatacacatgagtgaaatcctgcatcttgtcagccaacacaccttggccatttgttactggaggaggcctttggaatgacaggagggcataagagtttgacaatggttctgcaatgcttgcctaaggagacaatgagactcaaccaattccagtttgcatgtggcaaaataagttaaaaagttgaaaatttgagttgatgaataagaagtagaagggcagtcagtctaacaaattggtaaatgtaactagccctttgggtctaatgttggaatctggtacttggaagatgtgttattgttttgttatttgtatgtacattattgttcttccctgattcagtaaattctgtactagctatggtaagtgaaacagagggaaagcattggtgcaattttgccttcatgggaattagcctacttttggaggctagcttgaggtgtcattgggaatgtggctgctagagccccactctcgggaggcaaaatcagtcacatttatgtaactgaccccaaatcaaaaacagttactccctcttttttattcaaaccatattgtatcatgagtaaggttgcttctgtacatgtcctagaaagatactcctcatttgtatagtcacaaaggcaagagtctcaaaactggtcatctttgaatatcacttaagctttcttttatggactaggaaacaattgagcggaaacatgtggtcaactctaactgtagtgcagtcagaaatcccagtgtccacatttcctgcagggtctgccctagtactttccttttacttatgaccacccacagtttcacctttgaaagccaatgtttggtgtgcaagcgtaagcttaagagaaagaaaaagttgatgctataataaatttatttctgaaaaaaaaagtctcaggtgaagttatttttagataatatatttacttgttattcatgtgaactgtgttaaaaagttgcttttatgtaggattaatttaaatagaatacttggataaaatagataaaaataaaggcaaaaaacttgtcttttctctatacacatggcattggatttcatacaaatgttatgtttgaaatgaaagaatatatttaaaaaataatagcctttttaaagcaattttaggtgtatggaaaaactgaatggaaaacataaagagttttcatatgacccttaactgcctatcggttttccctaacattaacaacttgtattagtgtggtgtatttgttataattgatgggccaatataaaaacactatttttacctaaaggccatagtttatgttaaagttaattatttgtggcatacattctatgagttttgacaagtgcataatggcatgtgtccaatcatacagactaattttactgcctccaaaatcccttttgttccacctattcatccctctctccttccccctgaacccttggcaaactgatatttttactatctacatagttttggttttttccagaatgtcatacagttggaatcatataatatgtagccttttcacactggtctctttcaccttgcaatatgtgtttaaagtttctctatattttttcatggcttgacagcttatttctctgaataatattccgtcgcataaatgtgccacagtttgcttatccattcacatattgaaggccattttggttgctgtcacattttggcaattacaaatacagctgttatacacatttgtgtacaggttttgtgtagacaatttcaaactcatgtttgtaattaccaacgagtgcaatgtttggatcacactgacactatttgacttgaggacatgctatgaagctgcaataatcaagacagtgtggtactggagaaataagagacaaatagatcaataaaacaaaatagagaaccaagaaatagaccacaaaactatagtcaactgatgtttgacaaaagagcaaacacaattcaatggagaaattatagtcttttcaaaaaatggtgctgaaacaactgaacttaaacaggcaaatttctttttcttttttaattttcttttttccatgagctagtgcagatggcattgttttaatttcaaatccctattgtttattgctggtgtataagaaagcaattatctttcgtatattaactttgtgtcctgtaactttgccatagttgcccaattcacaaatagttctttactgaatcatgtcatctacaaacacaggtttttctcctcaatgtgtttacctttcttttctttctttttttcttgtgtcagtggattaactaggaccagtacattgtggagtaggagtggtgaaagcatacattcttactttgtttctgatcttagtgagaaaacatgtaatttctcatcattaagtatgttgttagctataggatttttttgtagatattctttaccagtttgagaaagtgtacctctagtaaaagtttttgaggttttatcatgaaatggtatgataaatattgttatcatatccattcatgatgttgaatagtgttaaatgctttttactgcttttactgcattatgatataatcataagattttttcctttaacccattgatatgatagattacattaacagattttcaaatgttgaactagtctcacataccagcaacaaataccacttgtttgcggtatagaattcttttactacatcagtgggttcaatttgctaatatttttgataatttttatatatttgtaagaaatattagttcatagctttcctttttcataatgtctttattgtgttttgatattagggtaatgctagtctcacagaatgagtgagaaagtattccttttgcttctactttttgaaaaatattatagagaatttatgagaatttatatttcttaaactagtatttctttaattggtattgcttccttaaatgtttagtaaagttcaccagtgaatccatctgagctggttgctttctgcttcagatggtattaattattgattaaattcctttaatagatataggcccatacagattacctatttctccttctgtgagttttgacatagaaattttcacaatactcatttattatctttctaatatacatgggattataatcatgacctctctttcatttctaataatagttgtctttctttttcttagttaaattagctaataatttatcacttttatgaggtttttcaaagaatcagattttctctgttgatttcccattgtcactttcatcaacttctgctctaattttgtatatgtcttttcttcagcttactttaaaattaatatgctcttcttttcttagtttcctaaggcatgatcttagactattggttttagatttccttttattctactatacacatcaaatgctataaatttactgctaggcactgcctttgctgaatcttataaattttgataaggtgaatttttgtttagttcaaaatattttaaaatttcttttgagacttcttctttgactcacgtgttatttagaagtgtggtatataatcttcaagtgttttgggttttccagttatctttactgattttcaatttaatttcattgtgatctgagagaatacttcacatgatttctgttcttttaaatgtgttaaggtgtgttttatgatccagaaagtgatttatcttggtgaatattctgtgctgtcttgagaatatgtattctgatgtgattgaatgaagcattctgtagatgacaattagatctagttgattgatgttgctgttcatttaaactatgttcttactgattccctactgaaaacaccagcacaaggttaacaagaattacaagcctgactttaggaaaaattagagtcaggcattggacagggtgtgctggtacactttgacccacttccctgcagctgctgcataacccagagtcacatagcacactaaccacctgctccttcattgttcctatagatagaatctctgacaccgaacatttttacccaaaaattgctaaaggtgttcttcatatcctgaatttcagcagaacagcagacaccaagcaatctgaaaacccccaccaaggaagtgactcagcaccaaaacgttgtttcttcatctccctgtcctgtgacttcattcctcacttcttgaccaatcagcaatcccacactttggcccatcacccatctaggccccttaaaaaacccatccccaaacctcttggggaggcagatttgaggttccctcctgtctccttgtttgactgtcctacaattattaaacgctttctctgctgcaactcccactgtttcagtgtattggtcagttactgtgcaatgagaaatcaaatctggaggtcctgtaacactatctgccatatctatcaataactgttagaggagtattgaaatcttcaactataatagtggattgatacatatttttatagtaattatattagtttttgccttatatattttgacactgttgttgggtgcacacactctaaggaatatatgtcttctcagagactttaccccttcttcattatgtaatgctcctctttatcactgataattctctttgctctgaagttgccttgattggaaattaatatagctgctccaggttgcttttgattagaattagcatggtacatttttctccattcttttacttttactctatctgtgtccttattaagtggacttcttatagacaatgtataattaggccttttttccccactctgacaatcttagtattttaattgatgtatcaaacctttgatatttaaatgatgatatagttggattaatatctaccatatttgttactgttttctatccattgctcttgttctctttttttcttctttctttctttttctgccttctctggttttaactgagctcataatagagttcattttcttcctcctctcttagcatattaattatacttcttttttcctgttttctgtagtagttgccctggagtttgcaatatacatttataaacaatccaagtcctatttaatataaaacaataatatttttttgtattgcaagtactttataacagagaagtcccagtccctcccttctagcccttataacattatgttcattcatttcacttttccatgagttacaatgaccaaatactttgccattattatcttgacaaactttaacctgacagatcaataagaaaaaggaaagattttatctttatgtattccttttctaatgctcttcccttctttttatagatctcagtttctgacttataccatgtaagtttcttgcaaggcaggtctactattaatagcaaaaaatttcttcagtttttgtttgtctaagaaagtcttaacttttgaagacttccattctgaataacaatgtcattggatacagattttagcttggtgggttttttgtttcagcactttaaattctttcctgcacagcttctgttgaatgtagaagagaaatttaatgtagtacttatctttgcttctttttatgtaaggtgtatcttgcttttttcaagatttttctctttgtgtttaacctcctgtggtttgaacttgatatgctcccgtgtagacgtctgtgtctttctttatttttatctttcttgatgttccctgggctttctggatctttgattttgtttctattaatacttctggaaaattcttgattattattgttttaaatatttccttggttttgcctctcctgctatacgaaatccctattgttgtggtggtaaattgtttggggagggaaaagttaggtttataaccctatggttagttaccattcttaaagtgagactgtgtctctgggctgtcacttctacaatttgttctcaacccctcttcccttttaggtgataaaagaaggctggagggagctggagttgggtattgcccttcctccaggtcagttaggctctggtaaaatagtttgtcttaagggtacgccttgttaagcataacagaaagctctgtgtatttcaaatggctacttcccctgccccctgactcacacacacaattagaagcaccaacatatttttctttaaaaaaaatgtatcacccctccccctcaggactgggcctccctggtgtttttaactctcaagcttgtccatactgagccttgaataatttgtcaattacagtttaaatgttcctaccctgatagccctcttgattttaatttaaaaagaagaaaagtactgtacatcattatataataatgtctcccttctttctatgaagagatctcataatcctttttttactaacactttaccatatgtgattgacaaatttatgacgttagaaaaggaagacaactttgaatgtatgcaaagaaagatttggagaatcaaagtaacatattcaaaagcatcactaataagctttgttagttccttggcttttgtttgtaataattttgtatttaattagaaaataacgtgattctatccttgataattgagtaaagagccattcaaagagtgccaatctatggaccaggttttgattagcactgatttggtatgtagctttattgaacttagcaactcttctaggcaagttcaaggggcctgcttacctctgtctgtctttcaggactacaatctattcagaggaaaatctcaccttttctattttacaattgctgaagtgtcattttctgtatcagagtaatggtgctaatcaattgagaagatcacaaaactttggattcaaacattaacaagttatattgtgccaacagattatattttccaaaaaaaaaaaagagagagagaaaattggaaaaaaaaatagttggaaaacatgtgttaaacctcataatcaatctggtaatagaattttcatgattgtaccaaaccttatttcaatgaaaagccaatgtaatgtaactacattaacattcaattattctttattcctcatcgtaaatttagaaaaggtcaaaagagtaaagaagaaagtaaaattaatgttatcccacaacccttgtatataatattagttttccatttatatcacaacaaattaccacaaatttagcaacttaaagtaaaacaaaattattgtctcatagacctttaggtcagaaatctgggtgtacttggctggtttgtctgcttagagtctaccaaggctgggcttttatctagaggatctggaggaaaagctgctcccaggctcactcagcttcctggcagattcacttcctgatggctgcagggctgaggtccctgtctccttgctggctgtcagccagaacctctctcaccccatcgagggcccctgtattccatgttatatcagcccctctgtctccaaaccagcaaccagggcttcaaaccctcctcacgcttcaatctcttctgcctccaatttcagtaaaagcgtagacttttaagtgacttgattgggacaagctggacaaactctctactttaggatcaattaattatatatgcagagaccctcttgccgtgtaaagcaatattcacaccggtttcagggattagagtgtggacctcttcaggggaaccattctgcctgttatcacattttaatgtccctcaattttaggatgtttaattcattaacatataattcctttaaaaataggaattatactggatatactggtttgtaattgactttttcatgaaacaatgactggcatcgctgcatattttaatataatgtgctcagtgttcattattgtccaagtgtcaagcccactgggatgctcttggctaagagtgaagaattccacataattttgtacccctaatacttaaagcacaaaaattcagaatgacttagcatcttaaaaaatctggaagatttagtgttggtcatacaaagtcacccttactcatttgtattcttcttactttcttgagaagagacaaagacctaaggtctcattccaggagttatgtatgactttgatctgaatgtcattcagggtatacatcttgagaaggaaaagattgagaagctttgctttactctaaactgagatatggtttttaatgactgtgttgtattcaattatgagaaaggacaaatattttaaccaaatctatattttggaaataattaataatatttggtaacaactcaatatttttttgaacatagatccttggataaggccaaaatataaatattttaatgattataaatatatactatgtagctgctatctagaatgaatattctactttaaattctcactgattttatacagaaacacctattttactctgtcatctccataataaatgatgaacatactttaactgtaacactggcagatgtcttttaaagatatttggtatcttaagtagttatttatccttagattgcaatgagttttcatcgaaactgaatttttcttcttttaaaattatttttttatttttcatttttattttatttatttattttattatactttaagttctagggtacaggtgcacaacatgcaggtttgttacataggtatacatgtgccctgttggtttgctgcacccatcaactcgtcatttacactaggtatttctcccagtgctatccctcccccagcccctccacccctggacaggccctggtgtgtgatgttccccaccctgtgtccatgtgttctcattgttcagttcccacctatgagtgagaatatgtggtgtttggttttccgtccttgtgatagtttgctgagaatgatggtttccagcttcatccatgtccctgcaaaggacatgaactcatccttttttatggctgcgtagtattccatggtgtatatgtgccacattttcttaatccagtctatcattgatggacatttgggttggttccaagtctttgctattgtgaatagtgccacaataaacatacatgtgcatgtgtctttatagtagcatgatttataatcctttggggatatacccagtaataggatcactgggtcaaatggtacttctagtcctagacccttgaggaatcaccacactgtcttccaccatggttgaactaatttacactcccatcaacagtgtgaaagcgttcatatttctccacatcctctccagcatctgttgtttctgactttttaacgatcaacattctaactggtgtgagatggtatctcattgtggttttgatttgcatttctctaatgaccagtgatgatgagctttttttcatgtgtctgttggctgcataaatgtcttcttctgagaagtgtctgttcatatcctttgcccactttttgatggggttgtttttttcttgtatatttgtttaaattctttgtagattctggatattagccctttgacaggtgagcagattgcaaaaattttctcccactctataggttgcctgttcactctaatgatagtttcttttgctctgcagaagcaaattcttaacgttgtatgtcttcctttcttccttccatcttgccttccttccctcattcattccttgatttcctcctcctcttttttttaattgcttttgtttaaaaacagcatagtactatggttacaaagtagatagcaagatccagtaaaaatcaatgtgatgttaaatttaaaataaatttgctattattctggatccccaaaataacaatattatatgtgactttataggaatataggaatgctttttgaattagcagaaaaacatatggcattaatgtgcaaggaagaattatgccacatactctaaaagttctcaaaattgatatccatgaatctttttatctgtgcagtttaaaatgaatgtctttttttcttttgaaaattattttactgagatatattgattttatttttgaagtactggagtttcccaggttcctttaaactttcttcttagatttgctacaagatttttacactgtcatatttttgtaatgtacacttgaaatacatatgcaatgttgttaagtctacatttcttgttttgagaatttgacattcaaaatatgtattagtgttctaaaatatgtttctgcctccaaagccactgcttagcatggctgggtgttacagaaaatgctgtgtggctgtgaagtatgaagcattactaatatctcttagaatataaaatgaatttgttttctaaagtcaatgtgattctaggtcctcagaatttttatatagctacttagatgacagagttgtagttaatagtttgagaagtaggttttaatatctgtggtattgacatagttgttactcagtagattacaaaaaagaaaaatcttgtatccaattagaaataaacattctgtaagaatataacttcccagttagtcttgggagatggcagttcaagaagtactttgtgaaatattctaaaggattaacatagttcatcattttatgcaatggcaatacatatattatacaatacattcctatttttactcatgtagttcttcatataatgcatctaatattttaagggcttatatctgtaatttgactaggtcatttgtttagttatatttgaattttcagacaatcattaaaaaattgtggaagggtcactgttttattctcttattattttaaaaaaaataattaattaattaattatttattttttccatccagagtaattttgttttaaagttgtaggatgataatatttttacatctgtcacataaaattaatatttttaagcaatgtcacattttgaattgtattacaagtcaagaaaagatgttattattttaacacatgatattttgatattatcccaaatagatacagttgtgatattttcatagtttaactataaacatattttaaagtgccatttatttttattttattttattttattattaatatactttaagttttagggtacatgtgcataatgtgcaggttagttacgtatgtatacatgtgccacgctggtgtgctgcacccattaactcgtcatttagcattaggtatatctcctaatgctatccctcccccctccccccaccccacaacagtccccagagtgtgatgttccctttcctgtgtccatgtgttctcattgtttatttatttatttttgagacagagtctcactctgttgcctaggctctagtgcagtggtataatcctggctcactgcaacctctgccttccgggttcaagcaattctgcctcagcctcccaagtagctgggcctacaggtgcccaacaccatgcctggctcatttatgtatttttagtagagaagaggtttcaccatgttggccaggctggtctcaaactcctgaccttgtgatccgcctgccttggcctcccaaagctctgggattataggcgtgagccattgtgcccacctggggcactgttactttaacaacagaccatgtggaccactttgttgagcactcatatttcatgggaggcaagtttgaaaatttttattttagtgcagatgtgtacagcagcattttccaatgagtttgacatggttatgctctgttcgaattatgtttgtttatttcacaaattacaggtgcagcagtataaatactagagctttatgccgctagctcagaattaatttttacaaattggaaaatgttaatacattgatttttaaaagttgaatttaacaagcatttatgagctctaattttgtgtattagaagaatcattaataaaataaccagtacttattgagcactaatatgtgcagtttaatgctttattaatgatttttttaacagtcaaggaaactgaaattaacaaaatataagtaacttgcatgaatttcagaagttttcaggtaatagaagcaagattcaaattcactttttactcagatctcacagtcttaacattattctactctactgctctagaaacacttgttttctcctgacccttttatcccattcttcacaaactgtcattctcaaatttcaatcttcatccaaaacccgtagaagggtttgttatataaaacacaggatattagactccagtcccaacagtttctgctagtagtttaggtgcatacctataatatatatttccaaaaaaaaaaacctaggtgatatcaatgcttcttatccggggaccatgctttcaagaccactgcctacagtttcccttatgtttattgataaaacgggtggtatccattgtttgagttctattactattctatacacctgttctagttaaacaagatttagacacctgtgagtccagatgtcactgatttgaagatgatattaaatattctagtaccttcttcaaatgcttgttaattacctatcacataaaagtcctaattgattaatttattactcattaactggcagagctgtttcagtcagtctagactagacatagtttgcgagtttagaaatgtattctggagaattgattgatatgttatctgattataaaaatagaaataaaagaagaggtctggctgccgagccatgtacatatctagtattccactgaagatgcatggaatataattgtatattcattataattgaattattgtatctattttttcattgttaatggtatattgtttctttattacttcacctataggctattggataaaaaatgtttactattgccctttttattttatactttgaggtaaagccatttctacaaataaacaatttcttgtagtgtcttaacatccccacgtggaatgttttttaaaaatcatgtagcttattctaaatctattctaggcaaatgttaaaatcattttagttagaaatagaatgggatcaggcttcagtagatgccattagaagtggtggtttgtactaggaaggattcttcacttctacatctgtttaataagtttcacactttaaaactcattttattatcacaactgaagaaagagatagtaaaaatgtggagggatctaataaaatctagccatataatatttggagagggagatgggaaagggaaggagagacaggtaagacgtaccattaaaacagacaagcacacgataattcatggatgctgattacctgaccttttcttgcagcagactactcctgtgagacaaaaaggctagtaagaatacctagaatgtactttagatattatttttgagcactaatatagttagcctcaatgataattgcttttaagcaggccacacatacgctacacacacagacaaacaaaacacacattcatccacagggatgactgccatgtgcaaacatacactgaaaaccttctccaaggcaatgtccttcaacatcttttaaaaatgcattttaattgccattgtaactggaaaccgtttgcactcaaaattaaaataatcttcttttgctattcaggatatcgattatgttatgtcctatcacttggatttaattagatgtattttttttccatgccgaaggaggtaaaaccttagatataaatactgaaaaacaagcaccaatatttcactcatccagaaagaagtggctttccacattattcgcttgtgtacaattcttttttcagtttttctatcttacattaaactcatttactcataacatatccaagctgaatgctgcttttggctagaggtaatggtgtaagcactttttcctgccttgttaatcccagccttccacatacaagaaactttatttgaaatctgatctcacactgaatattcttattcttatctcaggtgtcaacattatcccatgtcccatctcagagcatcacatcttacgtgatcatattgtgataaatcatagcgttctacagtatgttctttgtttttcttatagcattttattgttgtactgtatttgttaaaaactgtatcataatacgtaatgtctgacatcaagagatcatatctttcctgaactgtttgcttctatattctgtaccttatgtctctttctgtttccatcaatacctttcaggcataaggaaaagaaggacactgattttcaattaatagtctctggcccaaaccctctattaggtacaaatatattaaatagatcatttttctcaacctatgtcagtgtttcataaggcaggaattatttttactttgtatatggaaaaaaggaaaccctgagatgctaagtaaattctttggtttgttaaattgaatgtaaaacatatttctgggcatacgtattgggggattggatagtccttgttttttctgagtgcattggttgaggagaatcctttgccaatatagtaatgcacagaggctctgcctatgcaaccttgaagaccctccacatacatgcacacacacaccactcacacacacaccacacagacacacatacacatacacacacacaaacacaaacacacatcacacatatacacacaccacacacacacaccacacagacacacatacacatacacacacacaaacacaaacacacatcacacatatacacacaccacacacacgcacacatagacacacacacacacagacacacacacacacaccacacacatggcacacacagacacaaacaccacacacagacacacggccagccgaagtttggagaaggaggcagcatggagaaaaggggagtctgacaccagcgagtttgtgaggaaggggaaggccaaggacttctaggggcaccgggctctgacataaatgtctgttgggggtgaataaagtcctgctgtgtaaaataggctcctcttgaatgccctccatatgaagtcatcctatgaagtctaaaaagaaaatcacaaattgctaagaaagatgaagtttcttaggaaaaacaatgtcaaaatgagcaccttgtactgcctggcatgcagtcaggacgaagcagtgggacgcagtctcttaagtgtggggccgtagtggaagccacggccagttggcatggaaatcacttcattctctgagccacacagaaagtatccccaggtcttcaattgtgttttgacagctacggagcagctgtctactccggcaaatgcgtctaatgtgctgtgaagattccttaattctgataattcactgctcttataaaaaagtcatgtaaaataaaatatcatttagggagagaatgtagcttctcatgaactctggtgaggacccatttcctggcctagaagttcacctgtgatctatgtcccctgcccacctgggctgttgggacttctgtgggtccactgcttacccagtgttttagacagatttcctccaaattgctccattttctctaacagccctagcattattgtgattaatttgactgcaattgagttttattacgagactgaaatttgtctttgactttggcagggaacttgcctctttgtcatcatcatttctagccagccagccggagctgtggtgccagacagtgcaagcgacaatcagcctacccagattgaaggtgtgtgtgtgtagggcctgcagagagggacagtgatgaggcagggagacgggggggaatttatgcggggagttggtccaatagtcattagaaaatagtcacaggaggacaatccaaagttgaatgaagtaagagcatcacttggtgactgacagttttaattaattcattaggaaagagtgtacctaaattatcttgtaccatacctgtctcacactgtctatcctgagtcaaaccaattaaacatttaaacataaaatagggtgatatttcattaagcataataacgtgcatttctcagctcaaaaatatgtcatatcaccaaacgttgcagaaaaatgagcaaatgaaataaatatggaatccacaatagaagaaaaattataaaaaatatataaaaacttccaattccaaactttacagaaattgttaaataaactatatttatattatgaaatgttaattattcattaaacccccattttctgaaaattatggtgtcataattatataatgatagtatgatattgagtatgaaaagtatgatattaaatgatataatgcaaattttgcaccctttttatggacgtgtttaaagtttgtagcagtgcaaaattttaacatatttctttctgaatggaggtaataggagtgatttttttttttatttaattttattttgctgtgatttctaccaggataaaggtgtaatcatgtatacttagaaaaaaaaatttaaattcttctgcaaatccaagaataagtggaggtttggcattaccattagagatttttatttttatctatcatgttgggccaaagtattactgccatttttttccatttatattttagtatagttccaatatttagaaactcctttaatgtaagttagagaaaattggacatataatatttaggaaaaagaaaatgcagtgtaaaaaataaagaataaaaaagttttctctagaaagcttgaaatctggcaccattatgtgaatatggggcaggggagcctttaataccagtgtgagctggagagcaggaggggtgagcacaaggcttgataaagaactaagactctaacccatacattctgcagcaagatttcttctgatctttatgttcctggggaccatggaaactagccaagggattggtatttctgcatgctaaagtgtagcctcatgcaaacctttaaaaagaaaaatacctgaggaaaaatgtgaaatttctcaatttcagatattcaagggcttcctgattggtctccctgagatcactcaccttttcttggatgatcaatattacaggataaattgtgtttcctaaaaatgtttacattgaagtcctaatctccagtgcatcataatgtgactttagttggagacatatgtttaaagcggtaataaggttaaggtgaggttatgagggtgagccctaatctaatatgactggtgtcctttaagaagtggagatgaggacacagacagacatagaggaaggatcgtgtgaagacacagggggaagacaaacatccacaagccaaggagaaaggccttagcagaaaccaatactgctgaccttagacttctagcctccaggaatgcaagtaaataaatttgtgctgcttaagccaaccaatcttggcagtttgttatggcatccctagcaaactaatgatgcaggagtttttcttaaccccttcatcggacttgtgacacggatgccccatttacttggcctgtcatgctcaacctcttgtacaaagaatgcactttgggcaccagcaagagcaggcttcatgtggaccctgaggcgatggtgcctaggtgggggtgcctgcggcccccaaagccccagagggcatattacaatgctctcttagctccaccgtctgtggacattgttatgttatcagctcagtgggcctcttgccttgtcgcgtggggctgctgctgtccaccagtgagggcaaaggactagtgtgacagccttttttgggtacctacacttggtgggtcctgagctcttgtccagcgtccaagaagaatgaggttgcacggacacttgaaggataatggaggtagataattttattcagcgaaggaaatggctctcggcagagaggggagctggagaggggatggggcaggcagataatcttccctgaagtctggccctctccggctggctcttccccaaagttaagccatctctcctctgaagcccagccatccctctgaagtcaagtcacttctctccagtcaagctgcttctctctctctaccaaatgagtctgggtctttatagggcacaggatgtggggcagaacaggctgtagatagttttggaaaaggcaacattctattggtaaaaagacgttattcaaaaagaaagaatcaggagagaatgggcaaacagggatagaagttctcactttgggccacaggtttcaggcttttgacttgatggtggggtttcaccagggactcacccacccctgtctgcccagaatttctgtttcctgcctctatcattaacacaaccaccaagccatcctattcacctctgccttataaaaatatgaaatactagctcttttcctgttctaaaagtgcttttgactggtctctgtggtctacagattaataataatctctatatgcttattagaattggcattatcaaggatattacatatatatccttatttagtatttataatatcttagtgagatagagattttaaatttcattttagagtaactgagcttaattaattgcccagtgtcactatgaacaagtctcccagtgttgagatgacactttcattttagtttttattattcaatgtgtaaattaaaagagttggagtcttgaaggtttgcggaacttgaagtattgtcttttcaaggttttcctattgtgctagttaaaatacttattgaccaggatgaagtcagacctgctgaagtttacatcaaggatggtggagagaaattaatttgtgggcctgtctcatcttctcctcaacaaaacccagtatgggggtcttggagacaaacagacctggggaaaattcctgctgtaacaactgaccaactctgccatctggcacaatttctcttagctgcagttttgaccctttaaactgagaataataactagtttatggaggtgtgatgaataaatgattggctgcatgcaaaacagcagagtgaagtagaataagcagtgcgtgttggctgttagtatcatctgatatcatgtggggatgatcaaaagacagagagcccactaaaaagtactttctcaatgtctataaaaggtaattgatttaacttgaaatagtttagactggggggagatagtaaaaatatcatttcatcttcctcatagacctgagctgaagctacccttactaacctgcttttgtgacggaatcaaagcttacttaattcccaaggtcaggcagctactaactggtacagtaaggtagccaactctggcaaccgagttctacattttcacagctacttcagtcaaatcctgattcaaggctgttaactttcacacttctcaagtgtctgtcttgtttcctcagaaccaagccagtggtagataacgtagaaaccatgtaataaccgtaattggcaaggcttcacttttcctacctcaagttacatgtcaccacaggatatgcaaggaaaaagagaattttccagttccttttcccatctgggtcagggaatggccaaaaaatgatcacagctgagaaatttatgtccatgtttaacatccttgcagagcctactttgcaaggaggtaagactacctgttgtcactggtattttcttttactaaaatataatttcacatttagaagctaataaggacctgaaaagttagctatgctatttatcataaaggtaatactatttttttgcagtgatggtgcttcctttcctgattttgaagtagattgtctctaagaagagaaatgatattcccctgaaaatcatatggccttcaggaggtgggggtgggaggtcatgaggttctttggatttgtgggaaagacgcaaagataatatatcaaagaagttaatgaaaatcatttacccagatgtgtttatcaaagatatagtgtttattcattacctctaccacacaccccatttcaaatcatttcttaaacctaaaaacagaaattatacacgcacagacggcctctaacttatgacggtttgacttaccatttgttgactttaagatggtgtgaaagcaatacacattcagtggaaaccatacttagaatttttaattttgatgttgtcccaggctgtcagtaagcagcaggatactctcatgatgctggcctgaagcagtgagccacagctcccagccagccaggcaatctcaagggtaaacaactgacactacactctacagtgtgttgccagtgtgtttgtgttatgtatttctgcaacccatcatgtctataaaacatccatctgtggcagtactcaacacattattataaaacaagcttcgcattagatgatttcgcccaactataggcaagtggaagtgttctgagcatgtttgaagtagactagcctaaactgtgatgagccataggttaagtgtattaaatgcattttcagtgtgtgctattttcaattttggatgggtttttttttttcaggacataaccccattgtaagttaaggagcatttgtattatttttctagcccatcatctctgccagatattttttaatctttgagattcccaattttatttgactatttcacccagggtaccactaatcacaatggcaatgccaactgaattcaggcattctattgtttctctttgctctcttttagcaattaaagaaggatataaaacttgatactttgggacacttcgttttaaacttcgggagtaggacttaaggattctgaagctgaggtggtaacagctatatatcctgccagaattggtctctgagccccagcctgcttctccatcaagtcataaaagtgtgcgttctgtgtactattgcctttaagggtctgtctgaactacttctcccagaactacttagttcatttatctcttctccagtgtggactctgaatcagatttgctctctgccttgttcccaggattttcagatttttacttgcttctcatttattcatccatcccacactttggcattttctatgtgccaggcattatgatggacttcagggatagttacatggctcaacaagatagacatggacccagtcttcctagagttttcagccaaattgtagtacctgtgagacagaaaagcctagcacctcttgcaaggcaggaagcaaagtagaggagacagaaatgtgcaatgtaaagccttttccttccaaaataaggagtggaatttgaaaataattatgacatttatttttaaatatatagtccctacccagtgttctgggatatatctttgacatgggcaaaaacaaaaacctcagcttcagccaaaacaactcattctatgcccctagtctagattattgcattttcttaccccaaatttacatacaattcttcttccagagacatgtatgatagggaagggaccccagaatgcttcctgttgccagatcaacactttcaaactcctccttgccctcctctgaattcttctagcgtaactgccatagaaagcatgctaaatattattgctttgagacagaaaaacttggcatttaattttaacttcaccactctacttaatacctctgggtttaattttgccatatgaaaggccaatctagataagtggcacacgtttactgcattattgtaaaatttaaatgagataatattcataaaagccctccagcagttaatatgtgtattatttctttgcttagtatgacttgaaaatagtgaaatctgtacattttattaaaaacaacaagaaaaaattccctgctttcataacttgccagttttattgacttgctgtgtaactcatggttgaaacaatgcagatttatatttaaggtagaaattctcttttgctcatttcaacctaattacaccaaattttgccttccttcctttttcccccaccttaaccattctcctttttcccttgtggcaaaatctaatgattcctatctttaatcatgagcaattaagtcacagtggaatatctctttgcctctggaatgcatggtaacctcatactctgacttatgaaactggaaacgtaaattacagcataaaatatttatcaattaaaattgtgttaatttttttaaatccaggtaatttttaacaacttttattccaggaaattataagtctatatttgctatggtttctaccattaaatatatgtatacacatatgcatacatatatatatatactatatacatatataatatttaatataagtttaattttacaatgaacccaatgtaccaggttggtgctttttaatgagaaatatatgtaatagaatgtttaataaatccatgaaatattaaacctaacttagtacttgggaatcttaaatccctcattaattttaagaaaggatgataaatataaatatatatatatattttatatatatatatatataaaatgtgcttttagtgatgcattatttgagccttaatacatttaaaagaatggctagaccagtgagcctaaaggacgttaaagatctttcctattctggatagaacagaagtgaagctgatgcatttttcagtgtctgttatctaccagatactgtgctagtggcttcataatcttggtctcctctaatcttccagcaaccccattttaaaatgccaaaatagccacttaaggataaggacagcagcatctctcaaggctaacttcctctctcatacctagtaagtggaaaaacagaggcttgtatgatatttaaacatagcctatgcacttttctatttcctacactgcttttagttagaaaagaaaaaaaaatgatcacaaatcactggtaaacatctgcaacatagaataatgcttctattatccagaatttaattaaatacacagatactttttttagtaccaagttggtttatgttagagtgtaactaatatgctcttcatagaaatgcagaaagacaagtggttaaaactatttgtgtaaaacatgatattatagccttggaagtgagaatcaggtatgaagcaatccttcttaatgtagggcccagctttgcttggccactttagagatggagtgtttcagtccttgtccttgttttccatctgtctggtctttggaaagcagaacagatgtaaatggtagagttctgagccattcaattagatttcatgcaccactgacccaaacatttctcctcaatcttatctgagttggtggcagatgtgcagcatgtcagaaagcattttcaaattaaagatggaaacatattgtatgttggttgatatggtcacaatatgtgtaagtggtaaaatatgtcaccactagagcaacaactatgatgcaagaaggaacaggaaaaatgggcatttcacatttcctttccttattatcagaagacaagaaagtataatttgtcaaatgtgcattggaaatcatgggcttcctgatatgtaataaagaccaatgtaaggctaattggattggactctgcattctgccatttacagggcttaatcaaggcatcttggtaatagagctgagtctgtgatgatttatgtagatagggctttgccatcactgaagatgatgagacttacactcagggaccctcatcattacccattcactcagcctcacaatccatggctgactcaaatcatgttgtgaatcagctaattaacaatgagatccttgcacttttatagatgatcaattaatacttgtcaatttattaagtttgcttgatgggctttagcaggtttcttgttgaggttatgagaacaatgatggcatagaagagagaaagaagcaaatatatatgtagataacctaccggctgtatggaccctgggcttaatggagatctcagtacaccctggggaaaggtgaggcccaataaaggcttccatactgaccatgaagagtgttttgaacctgatccaggatctgaagttctgaaatcacccacatattgtgtcattatcaatgagagtatacaaagaacagtcaaaaggaaataaacccatgcacaggtgttacctaaaggatttcttctcttgggggtaagtgtgaattcacttgagtagagagcattacctttaaaaattatagattaaaagaattacaagggatattacaactaattttttcttctttccattgagtgtttgggacccatttccacaccctgcaacatacacacagaataacttttaggtccatttattcccaaaatattgaatttgatgtcctctaattcctgactcatgacagtcaagagcagaggcccgtacaaaccaatttcttggtacctctcttcttcctggttctgccaatactgagtttcctctatcagactcacagttgacctgttaacataggtcatgctagtttcctgtaatattttcctcctgctcaaatctggtactttccacacatttatttttctattatcagctaccttgagaaagacaggagatcatatatttagctatttagctatttttttttttaccatattgatgttcattgtagtttaaataactctacagtggttgcattttaataaggctgctcctgacaacagtcctgaccgattttggaaagataccaaaaataaaaataaggatctccagaagtcctgtggactctgtcgttggagctggagtgtgcctccatccgtagacttcctgccatggtttccttccagcacattttcttcagggcatggaggctgaaaatgcctgacttctccatttaaatcactttaagcaaaacacagattatttaagcatatcttttgcatcctccatgcccagtagtaattttgcaaaattactgggaatctatttcagggcaaacttggcatttaaattaggtggttttaattagcatcttgactgcatgcagtcaacagcatgaagagaaggacagggaaaaatcacatcagcttatatttttgctgtagaaaaaaataaataaaacaataatatgctgaaaaaataacctcaaataattcaaagcaagatggctggcaattttctggaattagaatgataaactttatcatatattgaaattgttatatactgcaagactccttttaattatctttaccagaattttcataaagtttacctttcttctacacaaagaggcccacagacagtgccattgcagttattctaacacaggtgccaaatggactctcacatacatcccttccccctccactgttaaatattacccatcattcaagccatgacttaaaaactcacttctaggttatataaaggtaaccttagccacaaatgtcatctctctgtagcttgagaactcccacaatattctcatacagtcatatggcaaaacaagaacaccaacaccattcattgtttaccagttctaggcagtacaatctcagtgcttttccggaattgcctcatttaaccttcacagcagccagatgaggtgtgtgctactatagtgtcccattttacaggtaaggaaacaaagacgctttacaaagtgtaagtgtcttgcccaaggtcacagctagtaaatgggagaattgggtttgaactcacagtctttgcaccacacactacattatattgtgaggtggagagagtctctcaatatcatggaatatgttttacatattttcatgtgatttgaattttaaagatagtgattggaagtgaactatgaataatttcattttatatatattttagttatcaaaacattgccgttaggctttttctgcagtaaatgattacattacaaagctgttcaggagacgttatttttttaatcattctctagcatatttttccttttgtccttttatactggtaagaacatccagattctcagatgggcttagctgcagccgtggagtataaacaggatggaaaaatagggtgttaaccattatttgagttggctctcaccatcccatggaactagaagcaatttagaaacaggtggccacagagtttgctcaagaaagtcctgccaaaccaagatagggactttactgacttcttcttactctgctgatgccactgtacagagctcagatgaaccttggttgttgactttactgcaagaaaaaaaaaagcggttccacatacacactctttcaacagcttgttgaattccaggcacactctgggaagcccttagaagtgatgacctcatgcagagaggaggctggaagctctgtcatttcaggaacagttacggaagtaggagtgcaattgaaactttggggactttatttaccactgtattcaatgacttcaacagcttcaatatggaaggaggatttaatttcttttgtgcaggataaacaagagaaagatctggctcaatattaagaagaatataaaatggtcacagagtgtattggaaaaagcacagaaatttattcagaacacttgattctgaactgagaccctggtcttgctgctgtcttcccataaggtttttctgcttagactttctgaaattcatttattcaaatgttaagtgagcatagtaatatctatcttttagatttggggaggataaaactactgaaagataaatcagttagcatgcatactaacattagggaggagcattcaagggatcagtacaggctgtgcaaccttttcccagtattgtcaaatgggaattcaaaaatccaataaacctgtaaaattgcttccaaaacagggactatgaaaaatgaaaatgtctaccattctccctgaagtccattaagggattcaaatacctataatgacttaaataagtttctttagtccggatttaggaaattgaaggttgaagtacaaaaaaagaaaaagaaaataagtaatgtatgcattttagtattatcttctggaaacaatttcttaacctgtgtgaattgcacaatccttgaacatgtggataccattctggtcggtaagcaagatgcagagtgctgtaggtgtgtacattcttaaatgaaacatacaccagtgagaagaatatacaggagagacagaagtatttctatccatggtagaactttctaagcaagttacccccaaatgagcatcctcctgaagtagtgagtttcctgccatggatgtatatgcttgagttaaaaattccttgagcaacccctgggtagggaggttacacagagctttcacatacagatgagagaattgaagtaaacatggattttgaagttcctttctaccatgattccattatacttcaggactttaaaatggggactagttgggatagatctgtgaagttaaaactgaaggaaccttcagatagtcttgacaataaggacagaagtcagaataaaatgatttcctcaagaatacctttgcctcctaaagtcagccttttttctcctctttgtgtatgaagagaaagggagtgaaaagcagatgtcccaatgaagatgtgattttgtatcattctggggaactgacaccaaagggaatccagggacccatggaccaggagccaggattcaccttcttccccagcaataaaaggggtgggagctgccagcaactaaatcgcagtttccagccagggagtatggtggcaaccatgctgcctaatacaaacaatgggtttgttccagtgcacacctcaagaaatgtatttaaattccaaatcccaaatgaattcggaataagaagaaaatgggaggcgccaaagagtaaaaagtcagagaaaagtaaataaagaggtaattttagagaagaacagcaatatgaaaatcttttcaagatagggttgtgtaaccaagcatttgtggacagggtgaggcaagatatatatggttttctttttttttttttttttcagataaaaatagcagtaactaattaagaaatcctggatcataaggaaaagtagaaagaagataagtcagttctagtcctagcacctaaacagagctactgtttatctttagataattcctttccaccagttattttcagtgtaagaattttaagttggcccggacgtggtggtgggcatctgtaatcccagctacttgggaggctgaggcaggagagtcacttgaacctgggaggcgaaggttgcagtgagctgagatcacgccactgcattccagcctggttgacaagagtgaaactctgtcaaaaaaaaaaaattaagttgaaatagttttaatggccaattttatatttaattttcatatgaatctagactatttctcttggttattataaacccttcaaaaatacaatttaatggctatgtaatattccttaaatagatacacattaacttattctatcttctgattgttggacaacaaggtttgctttcattgtttttactattcaaaagaggttttaattacatttttgttcacaaagactttttttctttaaattatactgctagcctgggattattgagtgtgaatataattaaagttttaatatacaatgttgcaataagttttccaagtgtcttcagatgagcaaaaacagtgtatgccttttatcacttctctgaggcagggttttggttgttactgtaaccttcttttcaggatgaggtctgggaattagtcattactctgtctgctgagaaaaagaacctatagcactttacagaaagctgctaattaatccttccaactctctagtgtgggaaggaggtagaaatgtctccactgcagtatttactaagaaatattgtaaatggatatgacagacaccaattcaaattccccggatgagggagagccgtcttgctagatgatcatgacttctgctaaaaacaacccccattgactccagaggtttcctagaagattctgggctgctgcatttgccatgcccatcgtctctatattttgaactcatgagaacccttgggtctagttcgggattccaccctcttccgaagagatacatacagtctgaaagtaatgataaaatttactaagtctttcaggcaatgtttaaaatttgtgcctacagtttccttcagcttttgtttccatttgactgtgggcatccccagatgccttcagccgtggttttttttttttttttcagtctttgtaatagctaacgctgacctccacgttggcactgaatttccttttttgatctcatgttctcataaggcaagatagccccatgcagcctctgatagggttcacgtgtctttgttagttttgtttttgtgatttttgtttgcttgcttttttatttgcaagtaattccacactgaaaatttaaaaataaaatttaaaaataacacccatggccaggtgtggtggctcacacctgtcatcccagcactttaagaggccgaggcaggcagatcacctgaggtcaggagttcaagaccagcccggccaacatggtgaaattccgtctctaccaaaaatacaaaaattagctgagtgtggtgccaggtgcctgtaatctcagctacttgggaggctgaggcagaagaatcacttgaacccgggagacagaggttgcactgggccgagatcacgccattgcacctccaacctgggcaacaagagcaaaaccctgtctcaaaaattaaaaaataaaaatgtaaaaaataacacccacatatccttttcccagactcagctattgataacattctaacccatttacttcatcattttccatctaccaagcgactgttcaatagctaacatttttttctgatccataaatggcctttgggcatatcgtatactctgggctactatttcatagacttgaagatatattctgcctgcatttagttacataagacatccaaatgctttctcccaggcccctgatattacttaaaggagtcagattttatagctctatgagctcccctttacctggagtgcttctttttatttctagccctttttttaattacactttcagctactgcaaatacttactcatgtttcaaggatcagctcaaatattcaattttagggactttctatgaacttttccctggcagaaatttcctttattacaactcattatcgtatttcattttctcctgtgtgtttttttctggtagttggtaatcttcgcaaaagagaaggactgtgtagtattatataattttccttggtatctagcaattagtttagtaaatgccatgttttaggtaccccaaaatacttgtgaatcatagtaatataaatcgtctgtctttgttcatttacgttattattaattattttgtttaatcttttagtttgcttttcctcttgatgattgacttggttcatttaataccccattaactcagctcttactctaagcaagctgctgtgatagttgctcaagtgggaagttacaacagttaagaatgcttttggctgcaacacaagaaaatctatagttaaggtatctggatataggtgatttagtctttgatgcagtggctcattgatatcatcaagttctcaggcttgtttgaccttttcactctgccattgacaggtttgttaactcatggtcacaggatagctactgtacctccaagcatcacattttcatctgactgtgtttaagcaagaaatgaagaggtctgggtaaatggagatttctttaaattggatgaaaattgttttccagaaatcgtccagaagacttttccttatagtgcatttgctagaactgggtcacatatatatgcttagtggcaagaggtgttgggaaagtaagtacctggcataggaaaatagaatttccaagactgttttaaaataatcattaatcatatctggattgggtccatcatcatcataaacaaagccaggtttctctgagcaaagaaggggagactaagttcttggatagaaatgtcaagttgtacgacacagtcacaaatcaatagatcatttcagaactcaatccaaaactcatatgttccaatagagttgggagggtgaaaaagcggacaagtgtaacgccattaatcatgatctggagggtgagaagagaggagacagatgccccagatagatataattagtattagtgcagtccaccaagggcttaaagtgtggcccaggagtcaagatgtccaagcatcaggagtgtgtcagcaggctgatgtttacaaaggttaggactttctaccagcttatttaaagtctgttccagcgagctctgtttccacgagacgttactagaaaaatggaggctgtagccaagtttgggagatgggctatttgacattaatgtaccaaaatgtacacattttaagcagaggttgtagtggtcagtgtttctgaagcttatttgaccatcaatttttttgtccacagaaaagccaaatacatttggtaagtgttgtgtgtccttaacagcgaaaagagaactggcaagaaaaaggtgaaaggccaatcagagaaaaagaacctgaattttcaggcagatttttaagaaagatattaaaacattgataaccaaagttcagtgatcagaacttgggcatatagagattatggttcataaaggacaacgggcccatgagatattagcagcatgggcctttgttgttggatcatctgaacactggactagaagaagtgttcaggtgaatcctctaaattgtagaagcaattttccaagaatgagccatgttcaaggtaaaagtggagttatttttttgaggggagggagcagtgcaatgcacagggtgtccagtcatgactggaagatcaattaaaagcagaatcatggagagtagaaaagggtgaagaagacacaaggcaaggcttgataatgtacatgtacacatgtgtttatgtatacagtacacagaagtatgtatgtatgcttgtattacacacacagaaagaaatcactagagtcccatattcattatttatgttgtgatcttcagaagtttagaggtaattaaaaatagcatgtctagtttcacaataatttgggagatgcacattttttaaaaactcaaattaaataagtttgttcaatatttttagagatctcatgaaatagacccagaagagagccaatgctttcctctctaatatgtaaacatatcttatttagagaaatatagttagaaagtctggcagaaatcagtccaatggtttttcctgaaagcaaagtcaactattgatacctagaaagttctttggggaaagtgtaaggaaccagtaagtgattaaagtacatatttgacacatgttattcaccacatcattaattactcacttttcctccatatgcaggtcagatgatggttggatagagtgttggattttataatgttacattgttataaattgtaggggtagaagacaagagaagccatcaggtgcacctttctataaatgtgggttgggatgaggaaaaaggaagacagttgtgaccaggttcattgggccttgagagagtgatggtatatgggttagcttgaactaatctagaaccttcttcttaacaattaacagaactagaaagaatacttatatcttttggatttataaaggcgatcataaaataacttaaaaatacttgaagaaaagacctgaacccaaatggcttcatatcaaactacaagcaattcttggttaggagaggctaatacagtgcatcaaacctaaaccactctgcagtcttttactaccaccttcgtttgatcttctttcatcttctttgtcccatgatttctattctatctcattctgcaggcatcagaacccacgtagttatttgaaaggttctctccccataatctaaagactccagcttgactaaagttctaaagctccaaagaccccaaattcaagagcttttatgcttctttagcttcttttcttatttttggattctgtaagaatacatgcccatgatggagttgctgggcaggctttccagtccccaagaagggacatattcctgtcttctgagggtgctgtaggtcttctgttgggctgggggaggattcatggtcttacttttggaggggaaaacgccccttcttatctgagctccattttttctcatagacaaaagggtttactgtcattattattattattgttatctgtcctcgacgtagcagaagctaaatacattttttggtttgaaacaacaggctagacatccatagtattacttgtagtgcaccaacataaacaataccaaactagaatgttctcttctcctttcccttttcttctcaaataatgcagtcctgaagacataatatgagacattgcaaaggctgtgttcaggatgattgttggtgctgggcagggaggctgcagtggactaggcttgggctttggagcccaagtgagaggaaaaagtaaaacgtttatgaagtaggaaggagattgcctggtgagtggtgtcagagttgaagtgggtatgggggtgtccatatgtagagtggcttcgtgcgtagtgtcaaagtccaagggaatcttcatggggaaaggagtagtagcaacaatggaagattggttatatgtagtaatattaatccataagtaaatatattaaaggcagtgagagccatgcttctctttggaggggaagaaaaattgcaaataagagaaagaaaactaggatgaacctttttgtatgagactggaattatagccattaatctgaactcatggttttcaatatgtgtgtctatctacatatgtgtgtgtgtgtgtgtctgtgtgtgtgtgtgtgtgtaaatatgtgtacaggcatgcggtgtgtgtgcattccttagttctgtcaggtgagagagcctgggattaatgacactccacatcttggcatctaaataccattcttctccaaaagaaaccagtttgtcctggagaaacattagtttgcaagaaaagtacaagacaagccaagcctggaatgtctttttgtaccagaaagcaaaggagttctcaaaaagaatgatgagatgttcacatataagtgagaccatataatatttttctttctgtatctggtttatttcacttagcataatgtactccagggttatccatgttgcagcaaatggcaggatttcctactatttaaaggctgaataatattcagtttctttatctatttgtcctccatggacactcaggttatttccatatcttggctattctaaataatgttgcaatgaacatgggcatggagatatctttatgaggtggtgattttattttctttgagtatatacccagaagaggaattgctgggtcatatggtaactctgtttttaatctcttgtgggctgtgtgtgtgtgtgtgtgtgagagagagagtgtgtgtgagagagtgtgtgtgtgtttgagatagagaataaaatagtggctaccagaggcaggattaagggtaggaaatggggagatgtaggtcaaaagatactaagtagcagatatgtaggatgaacaaatttaaagatacaaagtacaacatgaagactatagttaattatagtgtattgtattcaggatttttgctaaatgactagattgtaactgctcctgccacagaggaaaaatagataactatgtgagacgatttgtttcatgatagtaactgttatactgtatatgtgtagctgaaaacagcatatattatgccttaagtatacacaataaaatttatttttttaaatgatgagaatatattaaaaggacacataagcctttttaaacggctcctactggccaaatttgggatgaattgagaattataataaataatgttagtaattgattatagctgattaaatgacatagaaaaaagaatttgttctgatataaataaaccaatgaataagataaatatttgttgaggaacaggatatttacatggtctcaccttgtcacaaaatacttattaattacaacaggaaacagtgaatctacattgaagaggccagtcataccccatttgaatccagtaatcagtatgaacatcattaatgatgagtcaagtcccataggatataatcagaagaatgagacatcacatcaataatgtgtaacctgtatctaattatgagggaacatcaggaaaaccaaaattgatagattgtccacaaaacaactgtcttgtagtcttcaaaaaatgtcaaagtcatgaaagtcaaggaaagactgaagaaatgtctcaaactgaagaaaataaatacaatatgacagctaagtacaatgcttacttgtgatccagagctttttgtcacaaaggccattattggaacaactggtgaaatttgaatagaatctgaaaattagatgatagccctgtggtaaagttaatttcccagagcattcgatgatagcaatgcggtaaagttaatttcccaattttgatatttatatcacagtcatgtataaaaaaatgtcctcatttgtgagaaatacacactagagtacttaagagtagtggagaatcaatttggcaatttacactaaaaaatttgcaggaaaaaacattcctttcactatattggaaactttcctgtaagtttagagttagtgacttcttgacaaacacctgaaatctgagctttaaaactgtaaaatgaaactataagaaaagaggaaaaaagatacgatgctgaattaaacatatgtatcacatacaagtgccactcttggatgaaatgctcttggtacagagcctgctggtaggttaataggaggaacataccgatttccatgccatgttcaaaggtgaatttgatcattctatgcaaattatatctgtactggagacttgtaattagtctaagcataatatgattaggtggatgaaatattttggagtttggttttgttttaaatgtaaatactcatgaaaagtaaaacatactgcactgtgtccctgggaatatttttgttatctttaaaatactcagtattataggcatttattaacacagccttacatttgcccggtttgacctggaggccgaaatgaattgtgacttatgtcccagctggtgttcccaaattatggcaaggactggatgtcatttgttgctgtgaatgacttcttgccagaaacctgagatctaagcatccaaaatcacactccaagggattcctgaaatacactttttttttttttcttttgagacggagtcttgctctgtcaccaggctggagtgcagtggtgcgatctcagctaactgcagcttccacctcgcaggttcaagtgattctcctgccttagcctcccaagtagctgggactacaggcacgtgccaccatgcccagctaatttgtgtatttttagtagcgacagggtttcaccatgttggccaggatggtctcaatctcttgacctcgggatcctcccgcctcagcctcccaaagtgctgggattacaagtgtgagccactgtgcccggccacatatttttttttaatcttctatcatataatcattaggtcgttgagcctttcaaaatcttctgtttgaaaacatccccttcaactctgtcgttgccatgtgaaaagatcaaattgaataatctactacccagtgtctctttatgtatgaaggctttaagccaaacacaggataccattgtcttaatcttcctgctgtataacaaaattacttaaactgggtaattaataaacaatagaagttttttgctcacagttgtggaggttggaaagttcaagtgtctagtgagatctctgtgctgcatagatggtgacttcttgctgtgtccacacatagtggaaagggtaaacaggctcccttgggcctcttttataaggctactaatcatatttatgaaagcagagctttcatgacctaatcacttcccaaggctccaccttttaataccaccacctggggatttaggtttgaacatatgaattttggagagacacagacattcagaccatagcagctatttacccatgcaaataacaaatccagtgatcaagaagctagtcatcaccacagttggtcagttgcaaccactgaataaagacaatgggatatttagctggaaagatgttcagatgacatttcttttctaattttcattgaaatttttcaaagctgctagaagttagacttttttaaaaacactcccattaaaaaccagagaagctatgctcttgtttatattggaatcaaaccaaatttaacccccttttaagattttcttggctgtaagaatttcttggtaatggctgaaagagccctgattatttttttaatttgacttttatttaagttcaggggtacatatgaaggtttgttatataggtaaacttgtgtcatggggtttgttttacagattatttcatcacccaggtattaagcctatacccattaattgttttcccgatcctctccctcctcccaccctccaccctccaataggccccagtgtgtgttgttcccctctatgtgtccatgtgttctcatcatttagctcccacttataagtgacaacatgcagtatttagttttctgttcccgtgttagtttgctagggataatggcctccagttccatccgtgttcctgcagaggacaagattgtattctttttgatggatgcatagcaaataccatttgacacagcaataccattactgggtatatacccaaagaaatgtaaattgttccattataaagatacatgcatgtgtatattcattgcagcactattcacaatagcaaagacatagcatcaacccaaatgtttgatcagtggtagacttgataaataaaatgtggtacatatacaccatggaatactatggagccctggtgattttatccagttgatgatacacttgggattactaaagcatagccatagccagttaggccacttcgtgttattcataaggaataagtcaaactttggactgcctggtaacatttcttcatattaagtcctaccttattctgagtgcaaatccatcatcaggtagtacctgttttctccatggactggacagggtgcatttataagcccatctttgtgtttagactgtactattaagaggaatatagcaaggacacctcttctccatttcacatgaagatggatgtattaagtattaactaggtgtttgcaaaatactttcaaggaaaaaaatgcaataaaagtgctaaatataattattattaaaaaattatgacaatcatttagatgagtaattttaaagctcttcattaaacatgattggatattatgttaattcattaagctctacttcaagtggtagataaataaggtgcattattaatatgtcataaactaaatgaaataatgcctcataggcctattatttttaaagtgccttgcaaatattaacaaatgcttacattcttttgaggacaacttgtacgatttgataggaattgttgcagtaattttgtttctcataatataaaatgcttactacaaaacctagggtctttaaatttttcagtctgtcgttttttttttttttttttttttttttttttttttttttgagacggagtctcgctctgtcgcccaggctggagtgcagtggcgcaatctcggctcactgcaagctccgcctcccgggttcacgccattctcctgcctcagcagtctgtcgttttttaagtaatgtatacttatttaaaaatacagatacatataaatatgaaaataaaattgttgctaatcactaaactacccaaataaagtctttgtgaatattttagaaacttttttgtcagttttctaagcttatatttgtgatctgtgcgcttgtgtatgtctgtatttctttcacaaagtgtcttattgtatataatgtctcatatattccatttctagttaaaatattaaacagaccacccttcccacactatttatgggcttgcaatgctattttttcactaaaaacaagtaaagaaacaagcaagtaaagaaacaaaaaagcagggtttcttagacaaatggctaatcctaggtctggtgtataagatgagcctgaaacattttcataacagatagtaagaaaagtagggcccatcaagagtactcatgatccaacctggagcccaggcactcacagcatcagaagccaactggctgaatgttggacaattcaggcaataacatcaatggattgaaatacatcaaatatgttaaaaatccatgccttcaaaataatacaaaagtaaaaaaataactgtttaccaatgcaggatgcttgtaaatcaacttatgattaaaacaacaaactaataaatagaaggaaagaagaaggttttatcctgttttaaattgtctttatttgtattaaatgtatgtggtaagtgtaattttgttacatggatagatcatgtagtggcaaagtcaaggcttttagggtattcatcatccaaattaatgtacactaagaaacttcttatcatccatcccctcaacctccccctttccaagtccctattgtttattattccacatgtgagcatgttatttaccgcccactaaatatctatgtccacgtgtgcatattttctagctcccacttgtgagaacatgcggtactttctgtctctgagctgtttcacttaagataatggcctacagttccatccatgttgctgcaaaagacatgattttatctatttgcatggcttcatggtattctattatatacatatgccacattttatctcctctatcaacaagtaaccaaatagtagatggagtttttttttttaatagaagtatattacagctggcaagtgagaaagaactgtcagaattagtataccacaattttccaactctaaattaattaatagaccaagacattgattattaacagctgttaacatcaataaaacagagtacaactaaatagcatatacttcctggtgaaataatgcacaccactcatgaactagtattgtttaaaaaatatgaacctagttctggtcaaacttctagatccaactactaatttatagaaaatcagatgatggagaaatatatgagatgataccatggttgaaactagcaaaaataagattgtagggaactctacaaggagaaaaaaaaaaccctggttcttccaatatacatacatactgaagagaaagagataacaagaaggaaacctacagggtaaaagaaacttaaataaaaatatcaaacaattgtgaaatgtgaatcttatttatattttaatttaaacaaaaagctgctgaaagatatcgtcaacatttgtgaaacatttagatatgtgaacactgaatatttgattattttgaaaaacattgttcacctttaggtgaaataatagtgtgtttatgtgtctatgtgtattatacatacacatatatatatatatttaaaaggatatttgtcttatagaaatagatcctgaaaaatgtgtatggataaagtgatatgaatttcctttaaaataattttagggcggaaggtagccacaagataaccatttattatactcttctgcctacctttacatatttttgaaatttaataataaaatattttaaaatatactgacttttctttcttataacaaagttttctttgaagacatgtgatatggtttggctctgtgtccccatccaaatctcatcttgtagctcccataattcccacatgttgccagagggacccagtgaaagataattgaatcatggtcagggccaggggggtggtttcctgtgctgttattgtgatagtgaataagtctaatgagatctgatggttttaaaaaggagagtttccctgcagaagctctctctctctttgcctgccaccatccatttaagatgtgacttgctcctccctgccttccactatgattgtgaggcctccccagccatatggaactgtaagtccattaaacttctttcttttctaaattgcccaggctcgggtatgtatttatcagcagtgtgaaaactgactgataccacatgattgccaaggtttccctaagcatgattaataatatattattgcttattaaatagatcagagggtctaaaacctacaaactgtgaggccttgaaagaaacttgatctagaatttttgtattccaattttattatatttgtctccaaaatttatctgtttttcttacactgattattaaatagtctaatcttttcccattattgtgaaatgaccctgttgcttcattcaagtacactgtgtatgcttcagttctctggcatgtccctgggctaatcctgggttctacttattcgttatttgtctcactgcttttcagctcctccgtttcttttgaatttctctctctctttctctgtctctgacacacacgcgcacacacacacacacacccacacacacacacacacacgagaatttcccaaatgtttgatccttgactaaccatttttatttaaaagcagtaaaaaagcagattggaaaccctggatataggggttaattgagttatagcagcagtgataagtccttttgctttggctggtctgtttctacagcaataaatcttccaatcttctgccttgtctgccagctttctagaagttaacagaagagcttttcttgagggtggggatataggaacctaatgctccttatataaacttcaagacacctgtgttttcagctcaccccactttcagaggtacctgattccttcaatccctgattctttccagcagtcacatgcaggaatgggatgcttcctgttggttttcctctctatctgcataggtgatgataagtttctaaagtgtttgcttcctaaatgagttgtgactataaagaaactttctagcttccaaaccactggtgatatctatgcttattttcttttattcttgagggcagatgccttttctcttctttttttaactgttaaatgaggttttgagctgttagagataagttccaaaaataactaaaatcataactctcaaaatgttaaagattttatttaacttactaatgaggaaactagtgagacattacaaccagttcaaagaagaatccaaggaacagatgcatttataattagcaatatttaaatgaatgtgcaaatagaggcaaaatttgttttttcttcagtaggagagcaaaatcaattaaaactctaccagacaggacagaatgtgtgtgtctatggacggggatgattttgcattgcttttagttattggcaatttacagagttgtaaaataactcccccagaattggaatcatcagatatcacagaaaagtatgctaagacattgcccagttttccactgaaacacatttttcccctacatggctcaaacaggatgaagccatgggttcaactattgaagtttaagtgagtgtatccatacctaattttcctttctttcttttttcttaggtgaactctactagacgatgaagtaatgcctgcatgtttttctgtcaatacaaaataatcaataatttgctttacagttttgagaaaacccattgatgctatgacaaaggttgcctgccttttccattttgctgctgttttcatattttttcttttttcttctaaacatcttaatgagtcagaagtatcatgatagaaaactgttaagctggtattatatgataccagatacccttgaaaatatctcatctatgcagtttcaccaacatttacacaagacttgaaaagcacccaaggtctgtcatagccagagaatattttctcctccagcactttctgtaaggtgtgagatcatttgatttgtgcatgagatcaaaataccagatcaagtgcatcagtgaatttctaattcttggaatgccttgtgacagtcactgtcttggcctaatcagaattgttatttactttagaattgccccacccatatggtcctctcaacagttcctggtgtccacagcccaggctgctgtcagtgttccagttccttgttgcattcataattgctccaaagtcattcttcaatgtgcaaactctttctgcctcaaccattatcagttgaacaagtatatttctatggtttgtgctgtttctgttcctgaatgcaactgcccaaatccatggcaaaataagacctttaggatataagaatatgaactcttcttgaatactactgcttttcatgtcttcttcttacgtcttccactaagtctgcagtaagagacttgcagcccctatggttataggtggggaaaaaacaagagtgttgtattgagacctgccttcaggcctctttcatttttccaaatccctttcttctatgttttctttttttaatttttattttttttcctatcttattgagcaacttctcttctctcagctatagtgcctggagataaaagctgtcatattgcagcttaaatacagtttcaacatatttcagtagcagctatacaatttctatagagtcagggattaacgtcagcagtttggttggaaaaaggcagggagaatattgaaaccatgttcatatgacacttgacatagaattgaggaaataacaattttccatgacaaagaatgagaaggaacaagtatgtattattggggatctgaatgcttgatccttgctacctcctaacctcttggccctacagctgactctattatgccctttgagaaacatcgtaaacaaaagtagtgggggtggggttttacagaggcaggcagatgagggagtaatccacaagtttatgggagtaatgaggtaagatggagatggaacttatcttgaaatatgtgagagcagagtgatcatttgcactcagccatttcttaattcttagaacgcaaaaggatggggagacttctcaaccttcactgtgttccaacttctaggaatttaggactcatgtaaagtacaatatggtcacctgtcacgtgtggtttgcattcctgttctttctgcaagtacatcatagcatgtcccccagtttttcaagtatatgacaaatgtgatttaacttcccattacagtaaattacgatgtcgaagacaaacaaagctagatgttggttaaagacgtccagcagttggttaagacagattttattcatataataactattacaatagggaagagagtctattgtaaactgagctcaactttgccagagcaagagacagaagtgttcttagatgctggggtatgctcaaggaaaggcactgattggtgttaagcatggtgggggagcagagatcagaccatgtgattgggccgtcagggtttgctaactggtgcttatccagaggagaaacaaatttctcctatctttctgtcagaaggtagtaagttggaacaaggtgcccaccaaatttaggcctttatcttcccacagggactgagagagaaagagataactttttaaacttttgcatttcttttttttttttttgctgttacttcacctttatttttttatgttctcttttttaattttattattattatactttaagttttagggtacatgtgcacaatgtgcaggttagttacatatgtatacatgtgccatgctggtgtgctgcacccattaactcttcatttagcattagatatatctcctaatgctatccctccccactcccccgaccccacaacagtccccagagtgtgatgttccccttcctgtgtccatgtgttctcattgttcaattcccacctatgagtgagaatatgcggtgtttggttttttgttcttgcgatagtttactgaggatgatgatttccagtttcatccttgtccctacaaaggacatgaactcatccttttttatggctgcatagtattccatggtgtatatgtgccacattttcttaatccagtctatcattgttggacatttggtttggttccaagtctttgctattgtgaatagagctgcaataaacatacgtgtgcatgtgtctttatagcagcatgatttatagtcctttgggtatatatccagtaatgggatggctgggccaaatggtatttctagttctagatccctgaggaatcaccacactgacttccacaatggttgaactagtttacagtcccaccaacagtgtaaaagtgttcctatttctccacatcctctccagcacctgttgtttcctgaatttttaatgattgccattctaactggtgtgagatggtatctcattgtggttttgatttgcattttttgatggccagtgatggtgagcattttttcatgtgttttttggctgcataattgtcttcttttgagaagtgtctgttcatgtccttcgcccactttttgatggggttgtttgtttttttcttgtaaatttgtttgagttcattgtagattctggatattagccctttgtcagatgagtaggttgcgaaaattttctcccattttgtaggttgcctgttcactctgatggtagtttcttttgctgtgcagaagctctttagtttaattagatcccatttgtcaattttggcttttgttgccattgcttttggtgttttagacatgaagtccttgcccatgcctatgtcctgaatggtactgcctaggttttcttctagggtttttatggttttaggtctaacgtttaagtctttaatccatcttgaattcatttttgtgtaaggtgtaagaaagggatccagtttcagctttctacatatggctagccagttttcccagcaccatttattaaatagggaatcgtttccccattgcttgtttttgtcaggtttgtcaaagatcagatagttgtagatatgcggcattatttctgagggctctgttctgttccattgatctatatctctgttttggtaccagtaccatgctgttttggttactgtagccttgtagtatagtttgaagtcaggtagtgtgatgccctccagctttgttcttttggcttaggattaacttggtgttgcgggctcttttttggttctgtatgaactttaaagtgtttttttccaattctgtgaagaaagtcattggtagcttgatggggatggcattgaagctataaattaccttgggcagtatggccattttcacgatattgattcttcctgcccatgagcatggaatgttcttccatttgtttgtatcctcttctatttcattgagcagtggtttgtagttctccttgaagaggtccttcacgtcccttgtaagttggattcctaggtattttattctctttgaagcaattgtgaatgggagttcactcatgatttggctctctgtttgtctgttactggtgtatgagaatgcttgtgatttttgtacattgattttgtaccctgagactttgctgaagttgctgatcagcttaaggagattttgggctgagacaatgcaacaacccttcatgctaaaaactctcaataaattaggtattgatgggacatatctcaaaataataagagctatctatgacaaacccacagccaatatcataccgaatgggcaaaaactggaagcattccctttgaaaactggcacaagacagggatgccctctctcaccactcctattcaacatagtgttggaagttctggccagggcaattaggcaggtgaaggaaataaagggtattcaattaggaaaagaggaagtgaaattgtccctgtttgcagatgacatgattgtagatctagaaaatgtttgcatttcaaagagacacccctctacctcctgcctccccttcacagtccttgagaagacagtttggggtggcagaatatttacatataaacaggcagagaaaggatttataattgcaaactttctaaagtatctgctctaagaggagctttaggggcctataagcctatcacaagcttttgactggaacaaacagtaaattctcctggcagtattgtgctttctggtgcaggctttttttttttttttttttttttttttctgagacagagtcttgctctgtggcccaggctggagtgcagtggcactatctcagctcactgtaacctctgcctcccaggtttaagcgtccctagtaactgggattacaggcacacaccaccacgcccggctaatttttgtatttttaatagagacagagtttcaccatgttggccagactggtcttgaactcctgaccttaggtgatctgcccacttcagcctcccaaagtgctgggattataggcatgagccactgcgcctggctggtgcaggcattttaatgagggtaggatgatctttgggacacagccttaaactgctagaagctatgctaaagttaagtctcttagtggtggaatttgggtggactgattattgctcagaattttttgtagttctcagtggaagttctttttttaaataacccactagtgaccttattgttgtaatggtggacattggcagtgaaagactatctttgtaccagattacaaccctgtaagcttctcaaacactcagaaaaatccaagaattctcaagaaattgaccctgttcagtcaatcaagccagacaagcatggggccaggtggtactgtgagatttcttggagtccagtgaaaacctaaacaaccaaacaaacaaaagtaatgtgacctagttaccaaaatattacgcttcttctttgtcatgatatgtatatgtatgtgtatgtctccctttacaggccatgtagtatatttcccacccttaatattaatattttgtaattgttacagcaaccttaagaattttcctaggctgctattcattaaggaggatactggccctgggctatgcttgcagcttccagctcctcccagcgagctattaattctctaaaaatgttttggtacttaatatgctgcctcctaatttatagcatctcactaagaaggaaacaaaaacaaaaaaaaacacctaatgttgtttgacctctgctatatcagcatgagggacacatctgtgtctcaacagctaataaaaatagagtcacaagggtgatgggcaaattttggtgagtgatttttgttgttgattaccacagacactagaactaaaatttcagtaggttgctactgattgcatgtcatggaatgctgggccatgcatccacatcagtttaagtaacagtggttaactggttaagtcattttccagacacagaaaaagtttgaggtacatattttttcttggtaatccaaaagaacttccacatcatcacgtaattgtttatttgctatttttacagacatttaaaaaatggaaaaacagaaagattcagtagtcatttagcttttataaaagaagcagatgccagggccccacctacagagatctgacagagttggtctgtccacacagagcctagatttttacatttcatcaagtgattttgatatatttcaagcccacacattgggaaaaactgctttcagacacttaacacatttaaacagagaagctttagctcaagtttgcatacaaaaatctataagtgatggaagcatataattgggctgctggttgagaaaggcagaaagcaacaggaggccattgagataaagaggaaaaatggtaagaaaattaggccaactatttgtagtgcactcatttcattttcttgtttagtttacattggttagaagaagatgacatggactaagtgtaaggtgaggtagtgggagtcgagaacaggaagaccactttagggtggggaggtctagaataagaagctgagcttagaatgtgatgtctgtgtgaaaagaactttagagatctccagattaaaaagagatctccatatttcctaataaggggaaaagaaaagatatgtccaataaaagagaaataatggggacttctaacaaatattgatgaagtgaaggaatgagacttccaagactgggtcataaaggacaccacagctgttctttgctctctcaggtcattctgtctggggaaagccatctgccatgtcataaggacactcaagctgtcctgtggagaagcctacatgacaaggaactgaggactccttggcaatagccagtgacgagtttaggcctttagccagcagtcgtgagtgtgccattgtggaagcagagcctttggcccataattttcaaccaaaggtgattttatacccccatggacttgtcaatgtctagagacattttggttgtcacaactgggaggtgggggtaatactagcgtgtaatggttggaggccatggatgctggcctcatagatatatgaggtatatattcatccccaaatatcagtagttccaaggtaaagaaacctgctcagtcccagtcaagccttcagatgactgcatcccagttgacatttggactgcaacattgaggcaggatatttccctgacctcttcacgggactcacagagggagtgcctcatttactcaacccacagttcttgactccttgtgggaggaagcacacaagtgagtgaggcaggaactggagtgcagaggtgctagaactagccagctgctttggcaccagcaggggtgaacttcattcacttggacctgctgtgatctgcccctggtgggaggaagcatgcaggtgagttggtgcaggagccaggatgagcgcttttagggtgccagcaggagtgaactccattgtgggccctgcagcagcacctggagggggtgcctgcaacccatgaagccgcagaggcagctgccttccaccggtgagggcaaagggtcagtgtgacagcctttttgtatccacactcttggctcctgagcccttatctagcatctaggagaatggaggtcacacgaatgaattgaaggatggtaaatgagggggattttattgccaatgaaagtggctctcagcaggaaggggagctgaaaaggggacagacgagatgggaagataatcttcccctgaagactggccatctccagatggatttatctcagaagttaggccctcaaggtttccctctgaagtcaagctgcttctctcctctccccaattgtagcctccaacatctagctgcttctcttctctctgctggctgagcctggggtttttataggcagaggatgtcaggtagggcaggccatgggtggttttggaaaaggcaacattcaagcaggaaaacagggatgtcagttctcactttgagctagtctcaggtttttcggcttgagggtggggctttgacagggacccacccctgtctgcctagaatttctcttcctcctgtccccatcaatgtcatgagagattttgagccacagccactcagttcatctgctccaggatttctgacctttcaaatgtgtgtgagataataaatgtgttgttttaagctgctgagttttgggttatttatgcagcaataaataactaatacagcccccaaaatgtttctctagggttggagtagatattttaagtaaccaaatcaggctggtatttggagggcataagagggacagacagaacatgaataaatatttctgctaaatagcatgttgggcagtaaagtatattttattatcatagttcatgagacttaccaaagctcaattagtgatgattataacaagtggcttgttaaagctgaaacttacatgtttcatacctcttggcagaaagacactggtaactgtcaagatttccaggaataattaagagtgctgaatgaggcagcaaggccttatggaatcagtaagtaaagaaaaacagaagttgcatatttacaaactgaacagtgaagtgagtaggtgataaatagagaagctaccaggatagaagcaaggtatgttagagatgatgctgtcatctttgtaaactttagtggagggctcaaagaagagaagttgaggctgatgttctgcaaatgtgactgaatgcaaactccctggagagcctgtggaaatgcagattgaggggctgcagattctgcatttgactaacaagtcccaagagaaaatgaaagaacttgattctgtagagaggacatttcttcttgtaaggcctcagagatgaaagggaattatattgataagacacacatatttggaagatgagaaaagggatccattctcatacaactagttcaggtttttttttaaaaaaaaaaacaaaggtggtgggggtggatcaccataatcctgccaagagtgaaagtaataggaacagagggggaaagcagcagaggaagggcaatggtttggaatagctgcaaggaataaataaagtggcgatgagctgtgccataagagcgagggcctcatcaagttgggataaataggatttactgagctacagtacacaatcacaggaacaagaggactagaagcttcagcttttagaaatgccacacacatacacttctaggtggcaggggggtgcaaagccagagattacgtactactgcgggtgtcttttctttcaacgagactctgtggcagccaaaatttgtagctgaaaagtaagctgcacagagcagttagacaagagcactacattatttgtgcagttttttgggggcttgtgaaatggagctagaaataccattttttttcctggggttgcatgggatgcgaccgtaagtgaatacatcatggtgataggctggacatgacccctttccctcttaagtgaaggttgaaggagctatgttgaatgagaggatttaaaacacattttactattctcaagaattttatctctcattgcaggctttttggcaggtagttaagattccatgcaaatcattttaaaataaagagggttgtgtgctcactgactgtgtagtgttcagtcttctgaatatatcttggtgtcattttccaataaaatgagcaggaatataaaccttgggttaaaaataattcagaaatagcagttattctatccctacagcatgcaatgtgtaatctttgaaaacaaaattactcccagacacacagaaatgcttaatgtataaagcaaaaagctattattatatagtcatcttagatttcttctaaatgtgtgcacagcacaaataattaataagtgaatgaacattgttaaacatgcctgttcgaaagtctcatcattagttatttcattatatattaattgttttcctgtattgtataacttttttctgttgatatcaaggtaaataaaatatgattctttttccaaggatttcagaatctattaaagagacagctagggaaatttatacagcaatgtaataaatgatatgttaaagataaacattataggaaataattcttctccgtggaaagaaaccttccttggtggctgaatcttcaggtaacatagaagtttgccttttgatatatttttaaagtgttatacgtatctcccaccaaaaatatattattggtacaatttctgaagttttaaaaattataaacaattttatattgactctgaaagcaaattattgtctaaatcagtagtacacagtttattttactgagaaagttttatttgccttaactattatataaaatatattaaataaaatgggtttttcatttaaaatgatatactgtcttatttcttatatatcagaataaattccaaatggatcaaggattttcgtgttagaaatagtacagtgaaagtacacgaagacaaaataaaatgatttgtatactttcttaatgaaaaataaaggataaaattgtcacatttaaaaatattctacagtaaaaaatggcattaaaaaacaaaagaaaaaatgacaacctgtagtaaacatctttgcaacaaataagcattaattttctaaattcatagaaatatacttaaaactgaaaatcaaaggatcaataaaaacaataggatatttttaagtacatgaaacagattatgcaaacacacatgaaaaatgcacacttctttttttcgggtgtggaacattaacataattagacatgaattttccttcatccaattgacagttgttcacgggattggaagaatgtggagatacagataccctcctctactctgggaaagggagtaagatatccttaagacaaatttagtaaaaactgcaagaaattaatggagcaattttacttctacatatctatttatcctacatatctatttacatgtgttgatagcagtaatgctgattacagtattgtttgaaagaaaatctcaaaaacaatctaaaagctcatcactaagaactagatcaattatcatgtgtccataaaacagaatattatgtgactattagcaagcataatataaatctatatatactgctttggaattaattatatcaaagagatgtagatataggactaaacacacacaaacaagatgtcaggacatctttgtaaaattttctcattcattttaataaacacacatatgaccttgtattagtttgcactctgaaattactgatatttgacatttttaacctaaagaaaagggactctcatagagttccaactaatatctaaaagtagtttcttgaaggatagtcaggaaactgttaaaactgtttgcctctggggagagcatctaatgcagaaggcaggtgcaattttaagcttttaaacaagttcatgtattacttttcagctgaaaagggatttttttaattacacaagttaaaataaataactgcattggcaacagacaaaaaaattgagcaatatattgaaaaatctttacataatccctatcacttatattacaagaactttggtgatctcttacttttctttctttctttcttttttcttttttttttttttttggtagtaacctccacatgctggaatgcctcagagtacattttaatatgattgcatcaaataaataccaaatttgaaaatagaaaagcattaaaccaattacataggtgtccactttaggttttcttgaatgtcctgagaatggaaatcatatcaaacaaattgtagtgaaactttatagggtcattttctttacatatcctttccttttcctaaagaaccactcctgtttttccccttcccaaatctttagttctctagccctcatttcccattctcttttgctgcaatccacctgtctgaaccatttgcccaggtctaagcctctgtctttgcatctcagccctgcctggtacctgtccagcaagggactggaagctgctggtaagaaaggttgcttctccatcagcagtcatggaggagaaggcggatctaaaacattaagacatgccccctcttatctgtcacatcatgcctcatatatctattttataacaaccccctcaaaattggaaaataaaagatctctttaaaacttaagccaggtcatgatgtagggtctcaagatctgccctgcccccaccttgccaacctatgtggctctcttctctctcgtctctggctctcctcccctcatcacgctggcctccaagctctcattccaacatgccaggcaggcttccccacacacccgtatatctcaattcctacttcctcacctctttcaggttttaattcagttaccaccttcttggtaaaactaaccaagaccaaccttagaaaagcctttgatgcctaccttgaaatcctcatactttgctctttcactctctctggctctttattttttacatagcaccgatcacattctatataatatagcatttatttattttatgtatattgtttatcacctctctctctgttctgtctaggtcagctccatcaggtaaggggttttgttttgttttccattttgatgtcaagaatatatatcaatgtttgagatacagggagtgctagtcaagtaccttactttgagttgctgattttctttttcttctctcctgtttttacttattttttcttttttagatgtcaatattattttcaagtaattatgaatcagtttgtactttaatctgagatatcttgaagggataagtttattggtagcccatggtgatggctttgtgcaaattagaaaacaatgtcatttttgtaaagacaaagctgcaagttgtgtaacttgcagtgctaatcatgggctagtggttagactatattcaccctggggaaatacaggctaacacttgtgcaagaaaaaaggaaaaaaaaaactgtcacaactgtacattacaaatgaaggatgtaaaattactacattctataggcattgaaaagacaacaggaactattatgaaaaacgttatgtcaaagaatttgacaactttgatgaaatggacaaagaccttaaagatacaaactactagagttcgttcatgaaaaaatagataagataaataccctgatatttagaaaagaaattgaatatggtgttaagtagcttacacatacacagaaaaaaaaaaaaatccctctaagctcacatggttcacttttgaagtctgccaaacatttaaaagaaatgaaacaaaagaaaatctgattctacacaaactcttccaggatatttaaagaaggaaatattatctaactaattctaaggtcaagcattaccttgattccaaaaccagacaaagactttacaagaaaataaaaacataaaccaatattttccatgaacataaattcaaaagtccttaattatttagaaaattaaatccagccacactttatatagaaaagtatattgcatcataatcaaacaagtatttatcttagagacacaaaagtaaattaacatttgaaaattaatcattgtaattcagtatatgtactaactataataaaacatataaccatctcaaatgagaaaacttatttaacagaatccaacattcattcctgatagaaaaacaaaaaactcttgggaatgtaggaatggcagacaactttctcagtaaatggcatttatgaaaaatctacattaaatatactttttagttaaaattagaagtttgttccttaagatcaggattcagacaatatgttcatatttaccacttctattcagaattgtgaatctcaaaattattatgcaaagtaaaaaagccagaaaaaaaaaagagtatgtactaattgattccatttagagaaaacactaaaaaatacaaactaatctataatagaaaaccgattagtggttgccagggaaaggggactgtggaagtgggggcgggagagattaaataggaatagttagaaactttttgggtgaggcatactttcattattgtgattgaggttcatgatttcatggatgtatactcacattaaaatttattattttttgcattttaaatatgtgcagtttattttatgaattaaacctagataaaactgttaagggatacttttttcaatcatttttcacatgggaagtatatgttagctatgccattttgaaggggaagagaataaataggctttacagtttttatttttaaataaagctgggaaatgctaaatgggaatgaggaggctataattgttgactctttgacaatggaatttcaaacattaatggcttgttctagatagtacaaattcactgatttcattattctgagctcaagtaatctttgaaatctgggagtggatttattaccggagacataaggaaagaaatataataaacattgcaaatggaacaatcgtgaatcaaggttatattttagaattatcccaaacaatggcaagtgccttgtctagatattttcttccatcattaaaatatttcacagaaaatcatcaaaagcctggagaaatacttgtctggactttctacatgatagtcccggatgcaattatagtagtatagctgtctctgcaatttttttttaaacttttacacacattaaaatattctaggctgggcatggtggctcacgcctgtaattccagcactttgggaggatatttgataatttgaggtcaggagttcgaggccacatggtgaaaccccatctctattaaaaatacaaaaaattagctgggcatagtggggtggttgcctgtagtcctagctactcaggaggctgaggcaggagaataacttgaacatgggggtgaaggttgcagagagccaagatcgtgccactgcacttcagcctgggcaacagagcgagcgagcgagactccgtctccagcaaaacaaagcaaaacagaaaaccaaagaaaaatattctaaagaaaaaaaaaatcagttgttgttttaataggttcagaggtaagtttgccatatcttatttaccatgaatgactctagtaatggcaatgccatcaatgcctctcatcttccaatggttgccttttcttctgttattactggactgttgggactggtagcactggtcatataagatgcccacagttgctaaaggaggacactgttagaaataaagtgacggccgggtgcaatggctcatgtatgtaatcccaacactttgggaggttgaggcgggcaaatcgcctgaggtcaggagttcaagaccagcctggccaacatggtgaaatcccatctctactaaaaatacaaaaattatctgggcatggtggtggttgcctgtaatcccagctactccagaggctgaggcaagtgaatcacttgaacctgggaggcggaggttgcagtgagctgagaccgggacattgcactctagtgtgggcgacaagagcaaaactccctctcaaaaaaaaaaaaaaaaaaaaaaaaaaaaaaaaaaaaaaactggaaagaaaagaaataaagtgactactgcaatagataaaataaattgcccagctgcctccaggtttgctattttttcattatcagtgttttcttgacagtgttaaaacatttggccccctaaattcacagtttattggaacacttgatgaaagctgaatctctgtagtcatgctgttagtgactcactcttcctttgaaatgtctaatgcatagatttggtgaaatgctgttttcttaggaaagtttggtggacattaaaattgcttttgcaagtgaaattaaagacattaatgtaaagtggcagtgctaatagccagataattgcagtgttagaataaatttcagagtaattttgactaccaaccatctcttcacagctaaacttcagataaaaataaattttacatggaaccgtactgagatttctgctcaggatctttacccaattatctcttgcgttcctgttatttttttctaactgtttgagtttcatgtagagtgctctccattctttttctgtcaatttattaataatatattttgcttacggttcacttcttatcagtttaattttattttacttggacagagaatggtctgtagttttcttagtaagaaaactgaccaggctaagctatcgttgtttttttatgtcctccctcctttattttcaatgtcctccctcttccatttttagaacatatcctattttttctaagttatttatgtaagtcagatggatttactgttaatatgttaatctgtatatagtgaaaattaagaacctatttttcctaaatcatgcaggcatacattaattcctttgacaaatatttactgagcatttcctgtataccagatcatatgctaattgctgaaggttcttacttaaatatttactattccctcgtctgacaattactcactgggctcttactatatcctaggcattgtttcaggagctaggatacagtagttacagcaaaccaacacacaaactaactcaagtcctctctcatggagactgaattctattgaggaaaacagccttctccccagtccctgaatatacacccttactcacacatatatattttaatataatgtacacatataaatatataaacagcatattaaatatatagaatgtctattatatattgtaacaagtatatataagtaatattacatatgtgatattaaatacatacacaaatatgtatatatatatacagagaggcatatgttttaagtaattttattttacttacctccctattactgtgccatttcatagggctactaaaattattatgtgcctttctattattggtactctggtatatttgtgtgtgtgtgtgtgtttgtgtgtatgcgtgtgtgcgtgtgcacatgcacgcctgtgtgctgttgggcaggtgatcaatgatgataagtctgtagccagagctaagaccatgtgtgtggcgtatttatgtattcatgattataaaagtcccagtggtctgctgaggtggtctaggttggtctgctgaggttgggttgctatccaacacaaaacgcaagcactaatcaaatgtttgtttggataaagagcaagaacagatgctccaaatgaatacattaaacagagacccttgggtcattaaagcttcatgcctttgatctaacaaactcagatctacagacgcctcatcagtggtgaagctgtttcccatctgctgggggtggggacctagttctcatggagggttttgaggacaagcatctcttcctcccaatgccctgattataacaagccaggaaagagagcccaaagccaaatgcccctgccattgttggcgatattgatgtcacgtttgctgtacgtgaatagttcttcttctaaagtaatagattcatattgtttgctgtcctggctgtctcttttcttttctttcatatcttttgttgtgtttttaaagtgacttttatatatgaatacaaagcaactcacgaagtagggtgtgggttgggggcaagaagtgccctgcaggctttggactgtttgtccaccaggtataatcacactctgctttagaaaacttttaaagtcatcagcaaggctcaaacagactcttttaaaaaaaaaaaaatcatgaattctcatgagccaattcacagattgtatttataattaatagaaggtctggggtatcctatcctctaaaagatgcttagacacaaagagcagtccttgaaattatcaaggtatttgtctcaaaaccacacaggaaacaacttcagccctcagtaccagagacagacagtcaatcatagttcaaatagccacatggacaattcagaagagccaggctgaagctacagagcaagggaatggatatgtgccaagtgccagtgcccagctactgcactagcattttcacatgaactcccaggtttaaggccccctccacctctgggagggagcataacatttagatcctcttgacttgaccaaaaaagcttgggcagggtagaagtacatctctccctcaaataattagaacctgaggtaagagtcaacagcaggtataaaggctccataaaacctttgaggccacatggttcttttaactttataccttgtcctccctagcatgaggcttccatcctcaaggttacaagacagctactagagccccagccgatgtaactgtattccaggtaggaagaagaaaaagacaacatggggtaaaaagagcctttcttgaagcccatttcatgacttctatctgaaatctcttagatgattagatgtactcattgccattataaataaaaaaccatgttctcttaccaagaaaggagaataatatcggataggtaactagcagtctctgagcaaaaaggtataattattcccattgaaaactgagtctcaaagagataaatgaactgaaccaaggtcctcacagagtcagtcaatggcaactgacagttttcccagaggaacatctgttatggcatggaccacaggagtcacagcttgagtctaagcaggggctgaggttgtctgaattcatctgccattgaggtttcctgggatttaattgcataagtcaattagaattctaatttttgtatgagacaaacaaaagcaccagggtgtgcagagaatgtagatctgaaaaggactgtgaagggatgtgagggagagctataacctatctgggtatctttttttaacaatagcctcataagcacatatccaaacctaaggagttagcaaaggaggaaggagaattctaggatcaccaagccttagcatcaatcaacagggagtaaaaaagatggtattcactgacctttttgaaaacacagtgtgccctgagctcagcgagaacttcaataatgtcaatagctcatcaagtgtttgcagctttggggtgatgtgttcttgtcaagggaggacatgagcactgctgcaaacactagaaaatgatattagcacaaacactagaaatatcaggtttgtaagaagatacttgaggttacagccaaccttccacttgcttcaggttggccatcaataatgggtgcatttatagtaagccttcaattcccaaattatatctggagtttgaaaaaccaatggcaagaggcattgcctgattcaggaaacacatccaagccaactgacctgttaggtcactgaccacagttgaatgtaacgtttatgggaagcttggatcaacgaactgggcagccttattatgctgacccatggtatgtctactctttggggaggcttttcatgtggtgggagtaagaaagccccaggcttacagtttgatatttaatgtgttcaaatctgcttttctcttacacctttacccccatgcttctaaaaggaatttgtatgtccataatatatatcattacactgtggtgacaattgtactggggctgattcaaacttggagctaataaacaataaatagtttaaataatactgccatacaatttctgtcattactctctgcaccacctcctctcctccatgagtttcatcctgtccatcagttctctttagtactagctgattaaaaagtagatatcctgccaataaatctagtaagctgtgaaacatttgagacacacacttccgagactgttttcatcagtggtagattagtaacaatttgctaatgaagattttcttttaattattggggaaaaggcatttcttaattaataggaagattggtttcatccagattaattattgccgggaatgtgtcccaagcccactaggcacaagctatttaaagttatcatattagcaacaaagttaagcagcttggggtttagtcttaataatgcggaccatggtaattaagttgaggcttatggatggagggtcttcaggggggtccatgaactcataaaatttgatggaatatgtttcataactttctcagcttctcaatgaggcacatgatggccgagtatgagcaatagtctctggggtcgctgtcatccgtgttcccacagcatgcactcccaccgtccagctttcactccatgatggtccagtaactagtcattagtgaggccagaaatcagtgacaaaggaatcacagcctcgagttgaagagaccacaaagatcaccacaaccaggtctctcattctaatttttgtcactgaatgctgactaacaaagtgttagtatctcattttcttttcatcaatactctacagctcatgatccatattctccgccttctcacgatgatgtccattatttccctttttcagttttccatcatgatacatggaattcagctccatatttgatgaatatccttctattttcattcccagccattgttctgattgtttgctccatcccgttcctgaaacctgattgcaccttgttgaccttcttcagagaaggctgatttctatgtgccccttctgttcctcatgttctgaaagtaggtttgatatcctgctgattactcaagcccttcctatagcacgtacttcttcagttcttgaacaatagtgttattctttgagatacaacatatcacaattcatcctagcctgcttattatcatcaacaattttttgtagacaccatcttttattaaaatgttggtattatcccagttctacccatgaccttgacggtctcatctccagtaattttttcttccacttcatcatatccacccactttcatgatcacactttggatctaatcatcaactctgtactaattccattgctgtgctctcagaaaactttgtctcctcatgactggtttattcagtaatacctaccttgatcttttattaacctcataagcatctttagtcctttgatccctctttttttaataccataccagcaaccttaacattttcctttctttctttatcctgcttagattccttggcccatcaattcaggaacttcagtgcacctccacataacagagtgcgaagaacatttctgagtgcttatttcacatgaaatctcaacaatattttacccattgaacccaccctctctgtggtgacttttcttttccctgggcatccactctactagctttgctccaattatctggctactacttcattttttttctttcagacagtctcactctgttgcacaggatgagtacagtggcgcgatctcggctcactgcaacctacacctcccaggttcaagcgattctcctgcctcagccttcagagtagctgaggttacaggcatgtgccaccatgcccagctaatttttgtatttttagtagagacagggtttcgccaggctggtcaggctggtctcgatctcccgacctcaggtgatccacccgcctttgcctcccaatggctactacttctttacagatccatttgcaagctgagccttttcttctcagccatcagttgctggagagcctctgcttatgttctcaggcccccttcataaattactctgtattctctcccttggtgctattctttatcatctatgtgagcaagtcttcaaacctttattatagctcaaaattctccagagagatatagatgttcataactccttcccttgactgtcttaatggaaaattaaattcaacttgtccacaattaaaatgtcaattatcccatttaacctgattattttccaggtatgcttctcagagtgagaccctattcccatcaggttccatagtctgaaatcctcagccttccctctgacactactctttcccttatttgcatctaaaaaaaattgattttctgtctctcagatccatccatttcactttcatctccatttccaccaccatagcccaagttaccatttataattttctggacgaatgttgaataatttccattttgacattgccgtatggttaatcccttgaatcctcttcccaccatggctagagttctttacaaactgcagatctgacttctatcccaattctgaccctttatcctccactgttaaatccaatcatggcttcctgttgctcagtttgcttttccagaggtaatctgaaaatagaacactttattcttcgtattccagccatgtgtttattcatttttatacttggatatggtaataaatatttgtgagatgactttaataaatgcatgatacattatatatacagagtgtagtagggtacttgcacatcgtctagaaactttaatgcaacagtgattctacacaaacctcatttccatctttgggagtttgaacagcacctgatttaagttgaaagaagcagagttctgtgtttctgactggggtccacagcagagcgcccctgcctctacgtccattctcctcaccttgggttccaacactgacacaaaaatgagggactatagtcctctgaactcaggagtggtcaaaacataacctaaagcccaaaggtagctggaagagttgtgatatgattctcataaccaactcttctctaggtggcacacagagatttttgtcggtttactgaaacaggcaccaccctgaggcagtaccatggttctgagtgtaaacactgcccagatgtggctctttcatgcctcgggtgtgaggcagatgtgaagaatgatgtctccagcaccaggagcagggcttagcgatctgatgttaatgtgtttttttccagctgtgatttggatatctcaacagtggaataatttgcccaaagtacccgttgactctaagtagtctttagtgcggtgctcaaaaggctttacacagagatactgcctggaaggaaagctaatttttttttaactcacaggcctgagataatgacgaaaggagaggagaataaaattaaagagaggaagacttgagaggaggtgaaagtataccatctaccctggggcacccccagccaagtgatattaagtcttactccttgtcaagaatgtcagaatcctcttgtgtgtgtgctcccaacagttacttggaccttgggaagccagaattcaggaacatgagcagacttcatgattctgctagtaactctttgttcaccccaagaacagctctcaagagcccttctagcagtaacatctcagataacttcatgtttatacatatgtatgcatacacccacaggcatgaggaaaattttagatgcaaagctgacaacattccaaaatttttgtagaaatttgctaagcaatagaaatatatcagtgaaaataatacaggagctaaatttatacgtcagtttcttgctcaccaacgcagtttttcaatatcaaggaagtgaaaaattaaaccagcttcctccctccctcccttattttctttcttcctttctcttttcttctcctcttccctcttcttctctgcccgcaccctctcctttttaacttttatttgcctgtttgcctttacttttattttcaaagccctttgaggcagagatgaacttctggcagaatgtctaaaattagctaggttctctggaaatgcagaactatttatgatacagttggctttctcagtactacagagagccaataataaccactcttaaatgatcctgaatgtggctagtatgcttcattgttgggaaatctgattttattaccctcttagattctatatttttaatgtattttgtaaccaatgagatttccacaagaaataaggatttggccttccccttgatgagtcaagcctgcatattcccctatgagtcatgagtctgcatattattagattggagttgttcctgctagatacaggccaaatttaccccaatttgaaaatatcaaacactgtaatcttaatataatattttgatgtgtctattattaggaatggccagagcaaacagttgagatctgtaagttcatatttaggaccaagtttccatgctctgtgtagagactgagaagcgttctgagcctccatcagcagctgttgcgtccactgaataattcattcaggaaacaaggactgagtacctttcatgtgccagattatctcgaaggctctggtgaccttaggatgaacaaaaaattatgctttcacaagtagaaggaaacgagtatgaatttgggaattgtctgcctttacattatagattgcctctattttctggtgggagtttagcctcatgatattggtgagagccacagatcctgaagggcatgaatttaaggctcagctatgctacttcccatctgggaactgctgttaaagtcggtaaatgctcaagaaatcaatcagaggcccttctcctcgttcttctttattttccatcatcaccaccatcgtcacctataatcaccatgatgatattagatattggtgcaagtagaatcagagatgtgtattgtttgatccaaatattgtatgttgcaaattgaaagtctgccatcctataaatatgaaggagcagttagggagtttcagtaataagcaaaaatgaaggtaagtaacttggactagtcagccatttatgatggtaataataataataataataataataataataataataatcagaaataacaaagtaactgtgaagttgagatatttgaagactagtcccagtactaaggtgctttggggcaatgcgcagttttctaaaagtaatcattttcttgggttggacacagaataaatttttagtactttattttcctggttcttcagttcaattttgctacccaaacttactaccaattatggtttctttacttcaaaattccaaagctccccagcaatttgcagggtgagattttgtgtgactgctggaaggcacattccaaaacataaagaaactttgccattggcagaaatggcctttctgggacacattcatcaaaaatgtgaaatgagaatttaaaaagccgcaacatgccgggcgcggtggctctcgcctgtaatcccagcactttgggaggccgaggcgggtggatcacgaggtcaggagatcgagagcatcctggctaacacggtgagaccccgtctctactaaaaatacaaaaaataagccgggcgtggtggtgggcgcctgtagtcccagctgctcaggaggctgaggcaggagaatggcgtgaacccgggaggcggagcttgcagtgagccgagatcgcaccactgcactccagcctgggcgacagagagagactctgtctcaaaaaaaaaaaaagaaaacaaaaaagctgcaacatgtggcatcctccaccactcccctttggagcccaagtgacaagaagagagagtactttactgagaatcattttgtttagaccactgtaagacttaaaaaaaattaataactttatttcttaagtcggtcaagatgaccttgattctggtgattagaaaaccctgtgtctcctgaactccttgccttctttcaccctactctccctccctctgtcatttcttcccactcttatttcccactactcatcatgtctccctctctttgtctctttgccttctttcacatctctgttttttttctatctctccctcacaaatcaatattctcctcagtagtcaccccataaatgaagcacaaacacacatcaacaaaaatgtgcacaaatacatgcggcataaacacacacaaactcatttttgtccacattgcacagtaaattatcagagacttgataatacttgttaatgagctcagtcacgcttattattcagtcctatatcatttttctacacccaaatgaacaagtatggttgtagagttttggagagagagtacctgctctttatcaaacctgtaggaagattctctcatgaccaccatgttatttcaggcagtatcttccttccctagcttacctgtctagcaatagatttaaaggacatatgtaaagagaaacttaaggtcataatcttcaggactcacaaaacaggtatcttctcctgtggatcctaaagcttatacattttcttggctctcttcaagaaaaaaaacaaaacaaaacaaaacaaaaacacaaatttacaagcagagagaattcaccaaagttagcagagactgggagatccaggtcctccttttgtgttctttttaggcaatgcattgaaacatgtttgcatagagagtttcctgattgcaacctggcatctcctctctacctgcaattctctgcatttcccatcaattctcatcctccttagagggttgaacaagagatgaaccctgaagcctgggctccattctctgcacagtaagtccacctctgggaggcaataagcccaagttccaaccttcccccttaggtggaaggcagctgtgacaatgagcttgggaccctagcctgcatccacaatatgttgccagtccatgcacatagctcctcctcccacaccccaaggtcctcaccagtgcctggaaaacccatcatgcttcagcgtactatggccttaaaacagctgcaacactgtgactcctttgtctctttcttagttatgtcactctcagtaagctccagttgttacaggagaatgaatctctggctgggaccttaccttgggtggtgttgttctcattggttgaaatatgttaatgtgatcgaaaagcccagagtatctggtctgtttttagctaaatatggattaaggtcatttcagaaactggctaaagcaagcatctttgactccccgttaaggagcagattgccttgaaagtctttgatctagcctggatttgtcatttttgccactctgaagatatatggagcagtggattagtgactgtcattctttggaagcactgctgaacagggtgcagagcttggacttcaggttggacagctctggtttctgagttccaatcttgaccctgtcattggctctgtgacctcacacatgtggctcaacttctctcctctgtatttcatcctttgtaaaatgaggtaaacgatacttcataggtggtaaatacctgattacagagagatgaaccaactcagttgaaaccacacacctattcaaaagtagaaccagaattagggatgctccaatgtcacatgtgtgattcctctacaagaacaagtgggagataattaggcagcagtcaaaaataatgtgaagctatgctaacatctatttatcacaggcaaagttttgattaattaaatgagtgagaactttgttctttggcttcccctactctcttcactgtctatatctccctatccatcctatatttaaatggttatgtttcccaagtttcgggcctgaactcttctgttttctttctaggttttatccttactgatctctaatatcagcaaaatttcagttgtcttctctggcgtgtaagttgtaaatttgcttttttaagaaagcccaaatcatgaagatgattttcctgagacagtgaagactaagctgagccagaaagaagcaggcctcaagcaggcgagagtactaggaaagaaatgttttaggcagtggggacagaaagtgcaaagggtgcctggtgagaaggagctgaggccatgaggagaatggaggacaggccatgtggccagagcacaggagaggggtggcaccagaggagactggagaggaggaagggggcatctttttatattgattttaaggaaaatggggtattgatttgtttgaaaatgcacctgggtgatagacatgatcagatttatggtaaaacaaacaaaagaaatatgtgaccccatggcaaacagaagatttcaggggctaatgtcaatgtggagagtagtaatgagctttctgccttcatttacgactaattacagcagcttgggtgatcatggtggtggggaggagatgtaagggggaatgctgcagcaggtcctcaaatattgtcattttgttagactattgacaagggaaaaacaaaacaaatcaaaacaaaacaaatcaaaacaaaacaattccaggcctgggcccctgcctgtgtggagtttgcatgttcccctcaaatctgcatggtttttttgttcgttggtttgtttgtttttgtgatggagtcttactctgtctcctgggctggagtgcagtggcacgatctcggcttactgcaactttcgcctcccaggttcaagcaatcctcctgcctcagcctccctagcagctgggattacaggcatgcaccaccacacccggctaattttttgtgttttcagtagagatggggttttaccatgttggccaggctggcctcagactcctgacctcagatgacccacctgcctcagcctcccaaagtgttgggattacaggcgtgagccaccgtgcccagcccttcatgggttttctcaggtattgctgtttcctcccacatcccaaagatctatgcatgaggtcaattgctgcagtgtgagtgagtgtgggtgcatatgaatgagtgcgccctgagatgggatggctggcatcttgtccagggctggccccgccttgcaccctgagctgctgggacaggctttagcctcccttgactctgagcttgaataattgggtaaataattatcttactttttaaattcatctttcttaaatgtatatatagctcacatttgtttcaatggtaaatagtagaggtctttatttaaaattgtgtgatatttttgtgaccagaaataggcagtaggaacttaactcttatttatatcaattagcctatagtaaaattgttttcattatactgtattttgcttaaagtggcaatttctaagaacctattgatgacattaagtaaagacttactgtatttggaattaaggtgacatagattgctgacagatcagatgtgggaatgaaggaaagtgagaggtcaggataactccttgattctggcttgagtgcagaatgagtggtatgaggtctaccaggagagagcacactggagacaatccaaagtttgggggttgggggatggaagaatagcctcagctataaatcttcactgggctttcagacaggttgagtttgagatgactttgcagtcgggatccatgtgaagataccaactagaaagttaggtctggagctcaaaggagaggcctatgctaaaaatataaatatgtggagtatctttaagtaagtgaccatttaagccagtgtcatgaattcaaatgctcagagggaaagaacatagatccaggagagaacgatcctagggttcaagactgaaccttggaacttcagcaataaaaggcgggtttaggagaatgattgaattagtccagcatacaagatgttcaacagtgttgctgggcaacgtcagggtagccatatgatttcttgtacaaatgaggggccttttgaaagtgaaagagtgctaaccaggagtatcaaggcaacatgtgtaaactgggactctgtatggcaaaattagacaaagcaagtagttagatttattcaggttggaattgtgacagatatgcacaccaggaaaataaagagacaagagaactcaatatggaattagtcatcaaatgccatctagttgacattcttgcctattaatctcttcctgcatgttactacataaactttccacactatgtattttttcatattgcctcatttttgttcaaaaacaacaatggctctcagttgtcagggtgagagtttagaatccctagctaaaaacccaaactcttagttcatctggcctatctttttaatctctcatttactttaatctctcattagctttcccgagagtcatatttgcctttttactgacacttaaacatggcttaagtatcatcttctctagacttttaataagtaattgaatatagtcccctttatgatcccagcaaggaatgagccttattgtctatcagtcatttgaatctactaggaggatggttcatccagcactctatatctgataacatcgggagcatcagtttccagggaagtacattcaggtaaagtgagaatgttgtgctggatgcgaagtctcagatctctcagatgaagtcccgttttgttccccacccccacctgccgtaatgaattctttaaccacctgatgggttctcctgcccactgcacaaacaaaattaattcacataattgcagaaaagaaagagtttaattgacatgaggccggccacaccatgggggagagggaattattatctcctcaaaggcttctagattagggggttttatttatatttatttatttatttatttatttatttatttattttttgagacggaacctcactgtgtcgcccaggctggagtgcaatggcgcgcctcggctcactgcaacctccgcctcctgggttcaagcgattcttcctccccaaccccctgagtagctgggattacaggcacccgccatcatgctggctaatttttgtatgtttgtagagatggggtttctctatgttgacgaggctgctcttgaactcctgacctcaggtggtccgcccacctcggcctcccaaagtgctgggattacaggtgtgagacactgcacccggccttggggtttttcaaagattgtttgggggaagtgatgggagtggctagacaatggttgtttgttgctgattggttgggggtgaagtcatagggttatgggaaatgttcctcctgtgtgctgaatagtttctggtggggccacaagagcagttggtgagtccaggtgaagccaggtgtcagacatgcaaagaacccgaaaagacatttcaaaaggccaatcttaggttcaataatagtgatgctgtccacaggggtaatcggggaagttagcataccttttgatctcttgaataatgactggcaatcctttatgtctacaccttagcagaattcagccccctctatctgcctagcctggtggtctctcattagctttacaaaagtggttgagttttggggaaaggctgttatcatttaacctataaattaaatgcctcccaaggctagcttggcttaagcagccaaggaataattaaaagcagtttgaaggctcaaggcaagaggggagttggctagatcagatctcccccactgccataattttctcactgttataatttttgcaaaggcagtttcagttctagtactctatctgggatgtaccttacttcacttacaaataagcacagatcatattttgtatctacataactaggcaagaaccatcctgaaagggtaacaaattctatgaatccatccaaatataaaaatattcacacgatgtttctgtaattccacacagttagaaaaaaaatcatataggaatcagggaggtgtattctcattcaataatagaaacaaaatgtctttattttgcttaaaattaacaggaaaaagcaacagcattgcagtaaagaaagagtttcattgacacgaggccagccacactatgtagaagagggagttattataggaatcaacagaaaaaagtcccagcccttctgttcacatgctttaaaaaaaactatcataacatcaaaattgaacttctgtcttcattaataatcataagctaccacatattatgttgattaaaaaaaaattgaaacatctgcttggattgccttaaggaagactaacctgttttcctgctaagggtgtttgcattctttgtaactctaaaggtgaaaggacatcaggggaccgcccccagccaccctcttattcatgttcctggatcacagaaaaaggtgaacatattttggtctgccatttctatttgtggtttttttgtttgttttttttcaagatggagtctcactctgtcacccaggctggagtgcagtggcacaatcttggctcactgcaaccttcacctcccaggttcaagcaactcttctgcctcagcctcccgagtagctgggattacaggtgtgtcccaccactcctggctaatttttgtatttttagtagagacagagttttgccatgtgactaggctggtcttgaattcctgacctcaaattatctgcccccctcggcctcccaaagtgctggattacaggccggagccatggcgcccagcctctatttgttattctctagtagaggactctgaattttgatttttttctttgaacgtttttttttctattgtagtttggagttgcttttaaggggagttaacgcatttgttgggctctaggtcactttgaggcagagaaaacttcaatcagacctcttagttttcttagatatctgaactcttaatctggagcatgcattttgtaatttaaataaaacttttccctttattttcttcaaaattatctttctttctttctttctttctctctctctctctctcttttttttttttttaaaagcagggtctcattgtgtcacccaggctggggcgcagtggcatgatctcagttcactacaatctcgggctcaagctatcctgtcacctcagctttgctagtagctgggacaacaggtgtgcaccaccacacctggctattttttgtactttttgtagagatgggggtttcaccatgttgcccaggctggtctcaactcctgggatccagcctcagcctcctaaactgttgggattataggcgcgagccactacacctggcccaaaattagtttcatttgagtttacatggggtggttgaaagttttggggagttttttgtttgtttttggaatcagtttcagactatgcactttttggtactgacacttttacacacaacaagatcattcatgcaaaaatgaagaaatagaaaaatgaaactcttgcttttttctcatctttctctggcttttcttctcttatggccattttctccctctttcttttttactgtctgaaactcttttcatagacttgaacactgcttagaattatagaactattagcaggggcaaattgtatgcatctgcaatactacctcaattcttgatcctcagaagaaagaatttgaccaagggggtgtaaggcagagtgagagactgaggcaggttttagagcaggaataaaagtttattaaaaagttttagagcaagaatgaaaggaagtaaagcacacttggaagggggccaagtgggcaacttgagagtcaagtgcactgtttgacgtttgtcttgggttttgtatgttgcatgatttggtgggttgccttacttctccattgattctccctttggagcgggctgcccacatgcacagtggcctgccagcgtttggaaggggccacatgcacggtgtgtttactgaagttgtacacatgctcacttgaggtctttttcccttaccagccaagtgttctaagaggaaggacatataccagttaaactccgccattttgcctcttagtgctcatgcttgagcccacacacataactcctgagatcttatcaggaagcggctgatcaccacttcaggtgtttcctatctattgggagactgcttttccctggtcactcacatccgtgtgaagagaccaccaaacaggctttgtgtgagcaacaaggctgtttatttcacctgggtgcaggcgggttgagtccgaaaaagagagtcagcgaagggagataggggtgggaccgttttataagatttgggtaggtaaaggaaaattacagtcaaagggggttgttctctggccggcaggggtgggggtcacaagatgctcagtaggggagctttttgagccaggatgagccaggaaaaggaatttcacaaggtaatgtcatcagttaaggcaggaacagaccattttcacttcttttgtcattcttcagttacttcaggccatctggatgtatacgtgcaggtcacaggggatatgatagcttagcttgggctcagaggcctgacacctggcactggcttaaaccaattgttattttagaaagacagtgtgacaactgcctgaccatcacccgacggtcgcctgacattcttagattgggggcccctctcctgctttcctcacgcctgcctgactacctactccaacagagcaacagcggacattaccagagtttttttttgcctaagagatcactctgcctccaggactgtgggttctgatgcctactgcattttatggagctcctttcctcagaagagtgttgacaggataaaaacaaatcctgggatcatgtcttccttgatatttctgagcaccgtgtatacatatgtatgtaatgatggactcacaaatatgccactcttatactcaatatttgaggtggacaatctgacattggaaatgtagacattgttgttagacctggatttcaatttttatgctttgttttgtgatgttgactgggctgtattaaatgtcttgagttttagtttcatgatctacaaaagtagagttataatttgaaggagaactgaaaggacttgatgagatgaccattgtgctgtcttgtacatagtagatgctcaggaagtgttggatcttttcttctcactccgtctgactctggactgttgtatagtcatagtcaaaaactttgtagccaaggtctattataaaactagcatattcatcataattatggcatttcatagcaggtggtatgtcacgttcaatgctcagctaagtaattgtttaaattccatacaaaaaacaagtatttttcttactctagtgaaaagaaaaatcttgcatttacaaaatcacttgaaataagaatttctggtatctaaataaaggaatataataatataatagttaatatttacatagcattttctgtgccaggaactgttctaagtctttacatatattagctcatttaagtctcatgatgactggctgcataattagtgaggtcagtccagtgaaaaataatgcaaagctgcttgttcaaaaattattaagaattttaacatggtgatgccagagcattaaactaagagtggggcctttctgattacagggcagtgtacaaatacccaagtgacatatctcaatcttcatatcaactctatgagataaacaccattattaattgcagacaaaataattacgaagtggggaaaagctaactcacacaaggctacagggacaggaaggtttggagctgggattctacccaggtaattagtgttcagagtctatgttcttacctactggaaaaaaaaaagaaaaaagtcttttgtttatgtactaacctttattttataaattgcactatgtattttatttcagagctatgatatcaaaatatctattttgatatgatcatatagtataccatattcatctatatcaatgccatggtttgtacaaatagaaaaagatctgatgggaagcattatccatgtagctagttacaccaaaactaatatgaattttaccaatcaccaaacactattctaagccctttacttatattaacatcatataactgttaataccaccctatgaaataggtactattgttgcaatcatagtattttagatgaggacattgaggaatggaagacatatatcttgagcaatgcctcacatctaataactgctaaggtgaaatttgaaccccaacaggctggttggggtcttcaaggtactttatgttagtctcttgactgtgatgaatgaaatgtgccattgttttaattttatccactgctaaatcaccaataatcagcagaatgcctgacacattaaataaccaatcaatgtttgatgaagtaatgaatgcactgagtcctttgaaaattaaaattttaatcatgcaagtaatacatggacacatgcttcttctaaaatgctaataaaatagtctaaagaaatcaaaccataaatgtcttaccagaccactctcccgcccttgtcatgattttaatctttattctctggacttttccaggaaggaccaagatttccaggagtgttctgtgtttatgaatcgctgttgatcatgctatgagccgacagggttgacgtttgctctgcatactcaatgcagctcaatatgatcctgaatatggtgaagctttcttcagagccatttcttttgctgcagacacataataaatgccctagtttcactaggcagtttcagtggaattcaatttgaaagctaaaaatgatgcagataattataagcagcttcaattccagttactgtccaatccctgcctgaaagctccttgccaagggatgttagccacatgatcctgtggctgctcaaggttaagctgttctgggcaagagtttaaatgtgctgccacagggcaggtttacttctttctaaacaactcaggctgttttctctagagccttgaagcccagggtctagaccagacattacaggattttatgtcaaagaagagtataatattaaaacataattggggcatcgctcatggttgttaagactgacttgtgataaaaaatcatgtgaggaaaaaaaactgccttttgggtaagctttagaaggtggcaattaaggaacttgagttttggagcaaaattgccttatttgaaatctaccactgccactgttgactgaacaattgactgattctgtacaatttactatattttctgaaactcagtttcctcatttgtaaactggagataataattgacttacctcataaaactgtggtaatgtcaattgaaacaattaatgtgaaatacctaatatgctgagattctcaataaatattagattttataagcttcataaaattaaaaagtgcaggagaaacaatttcagaataactcagtccagttggaaatattatgccaatatttttgctgaaagctggtgaaatcttcagcagggactggcagaaacaccagtgctttactaggcttttcttgggcataatattctcctgaagtaaataaattgacaaataaatcaatacattgacaaatgtcatttgtcagtaaaagtgacaccttctaaaatgaaggagttactcttttggtttcattgctatttaatggtatgttcagaagtgaactgacttattaactaatgtgatctgagtgactgtgatggacattctcctccaaagctgatagagtgcctacaacacttcctgctctgtaataggcacaacataaatatatagtgatttgcaagccaccttttggaggagaacacttcccattgtttttatatcttctaatacaccagtgcttggtaaggtcctcacaagagaatgctgatacctgcatttctctttccctggtttcctgcacaggctatggtgggcgtaagctcagttctcaacaaccgcctgctgaatagaacactgggcaagggaacaaggggttttaaaggcactgatagctctcaagaggctgctctgtctgccaagagatgagagccatagaatcagaagaaaatttggagaataaaaggttcagaaaggtgactagagtaggaggaggaaaacaaagagactttaaagcgctcttctcttgaagcaccatgtcctctcactatttattgtttatcaggtacccttagactggatactaagcaaggctcgtcaccacaaaccttgtcacatgcacattgtcccttcctactctttggagctaccattgtgtttgtgaatatcacacactgttcacttagatatagatagatagatgaaagataagatagatggatagatagatgataggtagatagtagatagacagatagatagatagatagatagatagatagatagatagataatagattaggagatagaaaatgtctttgtatttatctggtgatgggaaatcttgaagtttggagtcaacctgatttagttagggtaaataatagtgcttgctctaacaagttgagtgaccttgtacagtttagtggaaatgactcctttatgggcaacaactgctgaatagttgattcattatttttaaaattatgtttaagagaaaagtattctgaagatccgaacatctcttaaatatgttatgtttgcaaacataggaatttattcaccagtcctttgatggagacttaaagcttttcttgtgtattggtgtactgtttaaatttcttacaaaactcactcccatatataatctatacatgtaatctatgatttctagcttcagtttctttaaataggacaaaaactaaaactctttgcaaattatgctgtggggaaaatttgacagatgtttaccacacaccctctcccaaacagatttgtgaaaatacagaccatgtcttaattttttttttttttttttttttttttttctgagacagagtctcactctgtcgcccaggctggagtgcagtggcacgatctcagctcactgcaatctctgccttccgggttcacgccattctcctgccttagcctcctgaacagctgagactacaggtgcccaccaccacgcccggctaattttttgtatttttagtagagacggggtttcaccgtgttagccaggatggtctcgatctgacctcgtgatccacccgcctcggcctcccaaagtgctgggattacaggcgtgagccactgtgcccggcctcatgttttaattttgtatttctccctccctccctttatctttcctttcttccttcctccctcccttcctctctttttcttcctctatctcttcctctctccccttgatcacagtatatactgtagaaccttgtatatagtagcatcatgaaataaaggaattaaattaataatgggtaacttgcctactgtaacacctaacaaacatataatattcaataaaaatgctgttaccattattgttgtcattatatgtatatatgtttatcattatgtttctacagaagcaaagtaaattggtgtctttaagataatattaaagaaatggctaaggaggcttacatgagattttcagcaaagttccaagaattgaaaaactataagtagcagatgcaacctagaattccacttaccttatagtgataaaagacactacattagtttaagtttactagcccatcctgttgaaatatgtgtgctcatatattttagtaatacttgtatttttgtggtgaaatggttatgcttccaaaaataacaaattccagtgattttagttcaaaacagttaagagctagagctagaaaacaactttcttacttgcattatttttctttacattttcctaaactatacgcaggcaaaaaaatgttgtggaagtgctgttttatggaaaaaagccctgaggtgctatttgcctgcatgctactgaactgagtttacatctttgcaaacaggaggcttcccggaatgtgctgtgtgtatatattcagagcgcccctgtgttcactgttttaagtattgggttagagatctcactaaacaataaagtagcattagctccccgtagacaggtaatcctattatctttagatacaaggatacattttaataatacagatacggagattaaagcaggaggattgagaaagcatcccattccctcagggataatgggtaatgtaatcatgctcttgcactaagcaaataaattagaagtcttgattgcatcacaatggaagagattcatacttccatttctttcaaaagtgatggcagtctgcttccaaactaaggccatttaacatgtctttatacattttttcctagtttttgaaaaatattttaaattgaacccaaaggcaaatacgtataatgctagttgatgctttgggggatatatctttctatagaaaccttcccttccaatgccattgaaaaccaaatttcaaaattgagcactagaagtaagccaaaaatcaattaccattgatggaacaaaaaaaaacagtacatttttgtcaatattactgctttctttttttcttttctagctttgaaaattaacccccattatgtatgacaatctctaaactaaagaaacagtaaaactcttgaatatattctttgtacagcctttaagtaattaatggagtacaacacagtggtctcgataaaagttccagaagaactcaggagggcaagagatgctgtagaaaggagagaggatcaaagctgtgtcttgcaaaacagaaaagattggggcatgaaaaaggtgtggagcaagcaaaggtccaaaaaattgttccagaaaaaaaactgactaaataggaatgtaggaagtatcaagggaagataatttgggcagattctgaagaacctttagtgccttgataaggaattagactttaggatatctggagtatctctcagcagggaaaaatcttgatagcaatgggtttgagaacatgaatatgggaagggagggtaaggcaagtcatctacgaagtaagaaggccttagttttgaatattaaatgataaataagaaaaaatatgaaaaatgaacaagcaagactatgtagatggccgaatagacagaggccccccccaaaacttaaccacaccctcatctccaagagcccaggtgttttttcctatttatcatctcagctgctcaatggctcatgcaattttaaagcaagaagaaataatgaaataatgatgaagcagatgcactgtgtaagtgcacacagggatgaataaattatacaaaatgcactgcagttggaaggaaggaaaggaattactgaaagaaagtagcttcatggttttctcattgagatcaaactcagtcctgctcagtaaaaacgaactaagtactcttggtctggaggcctgaccaggaccttaggaacttgtgatacaaagactggaagttgccctggttgagtcagtgagtgagtggtgaatgaatgtggaggcctagcacattactctgtacactctgtagactttataaacactgtacagttaggctacactacgtttgtaaaaaaatattttttctttaattgtaaattaagatagcttgctgtaacatttttactttataaacttgtaattttttttactgttttgtagtaatacttagtttaaaatacacattgtacagccatacacattgtacagccatatgaaaatattttctctctgtatatctttatattataagcttctttctatgcttataatttttgttttattttctacttttaaacttttttcttaaaagctgagatataaccatatacactagcctaggccttcatggggtcaggatcaccaatatcgtcatcctctactacatcttgttccactagagggtcttcagggacaataacacacatggagctgtcatctcctatgataacaatgccttctcatggaatgcttcctgaacgaactgcctgaggctattttacagttaacattttttcttttaataccgtgtactcagaaagagtatactctaaaacaaccataaaaattatagtatagaaaatatattaactagtaacagagtaatttcttatcatgatcaaatattatgtactgtacagaattgtatgtgctatgctttcttttttttttttattttttattttttggagatggagtttagctcttgttgccctggctggagtgcaatggcatgatcttggctcactgcaacctctgcctcctggattcaagcgattctcctgcctcaacctcccgagtagctggaattataggcgcccaccgctacgcctggctaatttttgtatttttagtagagatggggttttgccatgttgaccaggctggtcttcaactcctgacctcaggtgatccacccacctcagccccccaaagtgctgggattataggcacgagccaccgcgccctgccccatgtgctatacttttataggactgacagtacaggaagtttgtttataccagcatcaccacaaacacatgagtaatacagtgcactacaacatcgtgacgaccatgtcactagatgatgggactttttcagctccattatgatcttatgggaccgcagtcatatacgcagtctgttgttaactaaaacgtcgttatgcagtgcatgagtgtatttgatgcaacacagtcatctcaggaattaaagtggctgtgtctaagtcccagtagccctccgttttgacttatttccttttcctcaaaaattagatgccctttcaacctggtttgacaaaaatcactgaaattgatcaatgcatataggttttgggtctatgaaaaaatgcatattttagctctgaagagaacgataacagaacttgactgggagttgtaaatgtcagtgaataacgggttatgggacatgaagcatattttcagatttctcagagaaccatacttgggtccaaatgacttcatgttaaagaaacggaataaaatcaactcagcattcctgctgaccagctttctatctcagtaagtaagtcatcatgccctccggagcaaccatcttaggtcaatcaaaacatttggcctcattaaccactttggatttatcttaggactttcttatttatagtcttcccaaggcataatgggcttcaaaatgtacttttccctggttcatgttgagttgaaccaagttctgtgcttttactcagcaggcagtcatttgactgtcagcttttatatttttctctatgatcaaggagttcatacggctgctcctaggtgcctaattaacattcctccatcactgcatccctgcttgtaattattcttcatgccacctttgtttcctcaaccatcaggaatatatcaataggtcaaatcgttttagtacttctgacttagctcttctttaagcttcataattattagatataaactgcagataatacagatctcttatttcagcagattctgtgattctgctttttgtttgtttgtttttgtcaggagagaaattggactaaattctgaagagtggccatggtttgggaagatagaagagggtgctgcatatagggatattaggagcagagctaaaaggcaggaatcaagttgcatgttggtgaagatatgtgatgtgttcggtgtagagaggtacacccttgaatttgaaatgtaatatggtggggggaggggtggaataatataaaccttagaataagagtaggtctaggaagctggtccccacatcttcaactcaccttacagccacccagcaggcagacttatctcccaaatctggtccttttactctcttactctggttctttcaatgagactccagtgccttcagctaaatttcaaatgatttctcctgccattctagacattgcaggtcccagcacacatgagtttcctaaactaatcttcagtccttgctctcctgccaggcacctcacatttcagccacattcagtacatccttgaactcaccatgaacactcatttccacattaccacccatgtgctcacttgctcttatcttccacctccagtgcacttataaactcctacacagtatataagatacaggtaaaatataagtcattgtttgtatcattcctcagtcatagctatttacttcactacatgtacatccgatacccttgaacatatctgtattacaccatttaccacaacgtattatatttatgtacttacatgtctaatctgccacctagacttgagctcagcgtttttatttatccatgttccccttaaagattctcatatgcctgatagatggcaggtacctaatcgatgtttgttaaagtgttttggatggagaatcactaccatgttctttcctaaaaaatcccaggaattggtggtataacatgactggtcattgttaattaatgttttctactagagattgttcttagtcagtcttcatgattttttttggttaacaaatattttggggattttaatggccaaaattatttctaaaaaattgcttctgtggttgttggtcattcacttagaaaggatttactgaacacttccaattaatgagctaatttcagttttctgaatcacaacaatatttatttcccaagaagtaaacaaatttctgcatataaattagaattttattaggtagcagttttataaatcatgtagtttagaatggcattctcctagaacaaatccataggtcttttttagaaaaaaaaaaaagaaaagaaaagaaaatgtcgcctcaataattttagatgtaatttccatacacattttattgttgtgtattataggttgattactgctcctgatagatttttaagttgcttaagcatataaaagccccaatataattttccacagatagatggagagaaagaactttttaaacgcaactctataatttgtatatctgaatcctgatcttttaaagctttcttagtgttttccttagcagaaaaaatgtttatcattagaactgttaaggaggaatcatatctccttttataaagtgctttatttttcaaagtaaaggaaatgcgagatggcaccttataaaattgctgatcaaaaatggtcaaatgttggcagtttcatgtggttcaccctaatacttacagcttgattttttgagaggaaaaaggattgaaggacgtaaaaatgttatcttccagtaatctcaaaagatacctgagagagaactatacagtgaatgctgatgtactgattatgaaatgtattttcataaaaatgactgtaacctggttaaacaaggcatttttctcctggattctgcacacactagtagaataaattcagttggtttccattcctctgtcagttagtgcacgtaagtctcacccatttgtaatgtctagaaatcttaaaaagcatcagaattaccattaatgatgatgatcacagtctgctagatgcccaggaatgactaaagcctactactaaagccccagtagcagtcaatataggttatgcttcaataacaaacaagtacaccaaatccttatagcataacacaatgtttatgtttaaaattgtgatatgagttgaatgactttccagagcagattttggagggggagaatactcaattatgtacttttcattaccacaaactgaagtggcacattctcagttctagttacattttatttgctaggactctggtctcaactaattggaagacgaaagtgaagtacaatgaatgaagaaaggagaggaaaatcagatatggttgagcactaaacatctttaccatagtttgtaagactaaatagacttcgtacattttatttagtatttttttcattcttgcttggggaaatctttccaagatacattgccaaactggggtaaatgaagatgaaagaaagtctgagacctaagaggttgaatttcttgaaactattttataatgaccatttccttacttctttttgccttgttgattctttccttgttcattctatttaccacaccagacataactccacatagcaagattttgccttgtctgatgccttcattttcataatttatttccacacatataagcagaatgggttacaatggcagacagaaatctttagctttgaaatagaatggccagtgagaagcatgcctatatgaagaatctcatatagagagaaaatttaaatttcaatagagtgtttttcttaaacttagaattggccacttttttttttttttgtcatttcttttcacttcacaggaacatagggaaatcttaacttcagaagcaatttgcgtgcaatctctcttcctggatgggtgaggattgcccccttcagctcctgctaagctttatcaaatggagaaagcctcatttcatgcaggcaggagtggagagtggctctagtgtgcatgctatcctcatcctccaaaatatttcacataaataatatgttaccatcagaaacataaaatatcaattatatattataaagcagaatttataattctacatagagtgtaactgagcaaaaattccattgaggtataaaaacagaaaatgcaaagaatctttgctcatatgaaactgacaacatgccatctccccttcatatgactaaacctgctctcccaatcccattgtaccatttggagagatttacatcaatccagaacaaaaattactcactttaccttaagtattgttagcttccttatttcattgtatttcttcagttccttcagtttgtttttaactgaatattggtttctattggtttcttcagttattttttaaatgatgtaaaaataaagtttatctcatatccctattaaaatctctcaacactcatgtctccctgacagcccctgctcattctctttcttccagcctggtacttccttcacttctctccttcctcctctttctccttcttctcctcctctttcttctttctttttccttgtctttctcttgtttttattttccttccccctcttcttccctcatctggaagtggcttatgatgcacccgaatcagaatcccgacgaacaaaaattatgattatctcaaccttaagaaaaacagctggattctagaaaaccctcaaagaaagtacgagatttgggaaagaagcacaaatgtcccccaagtccctaccccactctctcatgccgagaaaaaacagcttcacaacacaaagcttttatgaagggctagcagttccagtgatgggctcctgagccctgagcctaactggtgcctgttgacctcactgctgttcaaatactgtcttcttgtcctaaaattagacattacctttatttgattttctctggcactgtctgcctgccaaccagctgcctcccctgccacccccgcacacactggtgatgcattccagatccaaatccaagtcctggttgctgacatgattccagatctcactgactgtgggatttgtctagaattatgaggccaagtctcatattttgagatatgaagaggacagaaacataaatagacccagaacaggatctcagtgttacttttttatctgtgtgaaggacaacgatctctccattttattctctctttaatacctatttccaaacataagaaactggaacttatgatgtgcctatagtgtcaaacattgctccaggcatggtacttgcactgtcttgtttaattctcacacaaacctacacaagaactgttatgattctccttaattgatgaggcgccaaagtccagagggatcaagtaacttgcaaaggctcacagtcatgtggctgagcagaggttccaatccagggcatgttagtgcacacgggctcttccctagtgccataattcctcccctcaaataagattttcctggtaatttgtgttttttgaaccaataagacttaccctaataaaacaggataaaaggtaacaattggcaggcgcagtgcctgtaatcccagcgctttgggaggccaaggtgggtggatcacctgaggtcaggagtttggccaacatggcaaaaccccctctctacaaaaattagccaggcgtggtggcagagcctgtaatcccagctacttgagagtctgaggcaagaaaatcgcttgaacccaggaggcagaggttgcagtgagctgagattgcatcactcactccagcctgggtgacagagtgagattccatctcaaaaaaaaaaaaaaaagtaacaattaattccatttatatgggaaaactagatatagagaatgtatgcaatttgttgactcttttttggtaaaaagaactagtactagaaattcaaactttcaagcttctagttcagcactttttcaatgatattgatacaagatattttgctccttagctcagctaatctgggttcttgtctcaagaccaggaagaattaggcatgcagacacattgaagggtgagaaggatggaatgtattaagccaaaaagaagctctcagcaaagagaggaggtcctgcaagcaggtttccacctcccaaattgaataccagggccaccacacaggagacaaagaggccgagctccttccctgcataaggcgtgaattcctggtggctccaccccattccccaagtacaggtgggcctctagtccattgtgggcatgcccaggcaagccccctgtgcagttccctcatctgcacaaaacatctggtgtaaacacttgtgggatgggttggagattctgcagggattcttccgtatctgcgtaggcctttgtctgcctcctgcctctatcaatatcttgatgtttagaactgaggggaaaaatatatggtaatttttgagactgtgaggcagagctacttccttcactgtaatattcatggccctgaatgctggccaacagagggtcaggacacaggaagggaagcagcatcttatagatgggccgcccctcaacactgtttgctgcgctactcgatgtcactatagaagatgttgctctaccccaggttgcctctgcccactcctgtcaatcttgtttttcacaattaattattgacctatttgatcttcctaatttccaattagccacattctactttgtccaatttccccaatcctatcccttagtataaaatcctgctaaattgcatttttttcaatctccctaagtaatgtgatacatgatgtcaagccaacagcattcatttattttaaataaacttacagctagaaattttgtttctttaaccacattgctagacttgaataaagtattttatttaatgaatggacgatgatgataattgcattttttaaaagagcaaaggaatcattaggtattgcctgttttccaacaatactagattttattttaaatatgtcataattatttctacctgaagagcactggcactggagctagcctgccctggtacacatcgtggctccatgtcttaccagcggtgtgactgtgtgtgagttactaaatcactccgtgcttaggttttctcctacaaaacaaagataataataattcctctattatataattatggttagatgcaaataaaattgtgtccagaatttattccttctggtgggttcttggtctcgctgacttcaagaatgaagccacggaccttgcagtgagtgttacagctcttaaaggtggtgcatccggagtttgttccttctggtgggttcactgacttcaagaatgaagctgtggaactttgaatcgagtgttacagctttaaaggtggtgcagacccaaaaagtgagcagcaactagatttattgtgaagagtgaaagaacaaagctccctcagtgtggaaggagacccgagtgggttgccactggtggttggcatggccagctttttattctcttatttggccccgcccatgtcctgctgatttgtccattttacagagtgctgatttgtccattttacagagtgctgattagtccattttacagagtgctgattggtgcatttttacagagtgctgattggtgcatttagaatcctttagctggacacggagcgctgattggtgcgtttttacagagtgctgatggatgcatttacaagcctttagctagacacagagcgctggttggtgcgtttttacagagtgctgattggtgcatttagaatcctttagctagacacagagcgctgattggtgcgtttttacagagtgatgatgggtgcatttacaagcctttagctagacacaaaagttcttcaagtccccactcagcccaggaagtccagctggcttcacctctcaaaatgatataggtttgggggaacttttaaaaatttgggcagattattttttggcagttattttttgttgctatgttttatcttcacgtgtttgtgtgtgtgtttgtgtatttcttaagaatactcaaacttggctgggtgcagtggctcactcctgtaatcccagctctttgggaggtcaaggccagcagattgtttgaggctaggagtttgagaacagactgggagtatagtgaaaccctgtctctactaaaaatttaaaaaattatctgggtgtggtggcaatgcctgtagccttagctacttggaggctgaggcaggaggatcctttgagcccagaaggttgaggctgcactgagtcataattgtgccattgcaactctagcctgggtgacagagtttaaccctgtctctaaaagaaaaaaagaaagaaatgctcatgttcttggaataaattcatttttataaatttattcaaattagttatacaaaaaactatgaggaacatatgtctgtaagaaggttcatacaacctcattgaacatgattgctcctagtaggaacttaaatagataacataagacaacatcaataggattttaaggcagccatttacaattacaatctcattttaaggcagccattttaaggcagccatttacaattacaattacaatctcaaataataattttataaaatagaatattgtatattatttagaaaacaaattacacaaatgacttcaatttacattaaaactcatatgtacattggacatgcagtaagaatatgaataacttccaaattttctgcagcgagcctgtatcaatttaaaatcagaatttatgtgtatgtatttaaaatatatatttaacgtaattctaccatctgacctagtaattcctaatcatttaatgtcccatctaattctttactgttgagtaatttgatttccgatactgtaatttattaaaataatgaagaaaaaggaaaaatatgtactaacatgtaaatttcagcatgatatataagactagaaaattgaaacacaaaggaacaatagtcacggaatcgttaaatataataggatcgcagtttaatatacgagtatgaaaactcatatgttaagagagaaaaactggatacagctatatgtgtgtgcatctagatatagactaaaatatatttttaaaatcctatggctatgactagataaagggctagaagaaaatttttgtaagttttgacagtaattacttctggggagaggtgtttctgttttctctctattcttcatttccaaaattttctcctattatgttatataaatttatagcgaggaaaataaagatattttattaaatgtaatttcttaaagaaaatattttattttccttcttccattgacaagttctctaaggtaaattttttctgactcctcccagatcacgtgtccaccattttattttatctagggaatgacaacctcacttatgtcattttgaagtactgcattatatgatatttggggggaatggcctctcccttaaaacctttacctgcaagcttcctctggagtctttttgagtcagcacctccatctgtggtccaagatgaaaaaggatgtactaaatcaccttgacagtcgtctgtttgcattatatcatcagtccctgtcttatgtgtggatgcaacatttcttcaatccattctttgcctctcctaagtgcacacattctcaggcagaatggagaatcactttttgttttgctataaaacacacactgacttttgagacaccttcccagaatgtcccagcaagactattattaatttttaaacagagataggactcccaagaaggaaaaccaggccatggtttacttcgcataatttaactgcttaactcaaaatattttccctagagaccatcacggtagtgaaacttttcctattataccattcattgacaaatttgtaatcatgatgtatgtgtatatacttatagtatatatttaaaatgggcattctgaccttgtagtttataattacaggattaacaaggctgaaaggaaattatgtaaattaggaaataggacaagagtgagggacaaacctggaatgatgacaagcacagggaaagatggttaagggaaaaaaaaataacttcctcttttgctgatttccgtattgtctagagctagccatacttagaccagcaaataagccaatctttttctgatgtttactcagcattttctgaggctctcctagcaacaagagtgttgcagggtgctggtcctgagaaggccaagcacatgccccctttgtggaactcttggtcaaatggaaaaaccaagtccaagagtcaagcaaaaggccaagagttttgacagaatgctcacaggagtgtgttcaactttacctgggaaaaagaaaatgagcaagcagagagatatgactttgtcttagtgaatctgaccgttttcaagtaaaatgtatagcacatactttgtccagtttgaatggtgatatattgcaaattaaatgaattacttaaaggccactgtttatgatttaatctatgaaaaacgtccctccattgcatttctgcatacgttaggtacttctgtcagagcatcttattctgctagtttgtttacacttgtttctctctcttctgaactgagactttcaaatattatggtacaactatcagatgctgatatataatgcttagaaaatgtagatgaagtgggaaaacaaaaagtttcatatttggggtcttataaattgctcctgttttaaggaagatccaataatcaaacatacttacaccactttttgttgttgaattcaattggcataaaatgacaacacaaacacaattttaacatgattgaaattgttggatgatgaagtaggaaaaagtgttagggaagtccggaaaagtaaacctaaacctgcttaaggtaactggaaggaatggaagtggctgtcaaactgaagaaaagttttgtaaaaaaaaattacagagaaatccatattcccaaggtgatctctggattttgtccagaagactcaggcagctagccatcttgtgatgatcccaagaaattcgttcatgaactttttcttcttagagaggagaggatcacacatattcattttctatgaccagagctcagagatacaaacaaacactacgtccaattttatgtcagtagattgtctaaaatattcagagtctggatggataaaatattatattaccaacaaactaaaggacttgtgggtactccaacagcacgtgggcaattggaatgatatcctttttaacgtgactttagtaagtcttaaattgtgttagcagcataaatatgtgggaagtggtaggaagcagagaaaggaggacgcttgctggtagctgggtaggggcagggaagttgaggggcctccagacctcatttcagaaagtcattaggaatgtgtcactctgtaattggcctgcgtttctgggacccgtcagtatctgcctttttggatcaatgtgtgatttttgaggctgtgacagtcccgctctgagtgggttgcaggtgaagcacagttgccctgtcttacgaaagggagagggttggcaagaaaagtccatctgacattgtaaacagctaaatttatcaaggcaacccatttttcagctatacagaactgtatttctgtagctgttttttaaaaatattatctaataacctcctagatttttctcacttcctacctatggtgaaacatgtaaataaggagaacccaaaagcatctcagttcataacacgtttgatttttttgtttcttttctttggaaatgttcttgcatgaaccatttgcacaatgccaggataaagccagttcaaacagatgtgaattgctgacttgatcatgagaaaattagaaaaaagttacctaatgctagtgtaaaactggttagtgtgtgagggtgtgcttaaagaagcaggaaaattacacaagacgatatgagtaccccaccttggaatcttaacaggggaaaaagtctactcattaacatatgctttaaataatccaaaagattaaataataccatgataaaataacttacaattgcaaaaatgtatttttaaagtacaaaaataccagagaaaacatttttattgatctacgtaagccctattaaataaattattttgcagagacattatgcagtcattgggaaaatgggtttaaacttcagtcagactcagattcaagtcttagctctactgcactcttgttctatttcctaagcaacttaccaaaccttttggagtctcagtgttcttatctgtaaagtgctgataatataaatatctagcccacagagcggttgtgaggaacaaaggagaacacacataaagtacctgggttatagaaagtatgcaatgtatttgcgtcagtactgcttctaatagtactcagtgccactctccaaattccacaatatgcttaacactcaaacttatttgatgagaagatctatattttttctactataccacacctgtacttcacaatatttacattgtttaaaaaagcaaatgttggtctcattgatatttctatggctaactcatcatggaaatgttgaccatataaccttgtaatgtcttattaagaggaagtgggctttccaagggcaaatcaaagttttctgaaatacgaatgtattatgggtctctgaagcacatgggcattagggaaaacttcatcccaagatcctgaaatggattaggatcaatttgtgttaatcttgaagtaattgtctagcccagggaagttcctgttaagaactcacttaatgattgtggaagaaaagaaagaaaataaaagaaggaaagagggaaggaaggaaggaaggaaggaaggaagcaagggaggcagggagggagggagacagggagggagggaaggaaagaaggaaggaaggaagaagggatggagggaggaagtatcaataaattaattactagttataacacctgaggatcatcttcttgcgcaaattatttttaacgttctttagctacaggcaaagatcatcctcatcccaccacttttgtccaaaattgtagctgcatccttgttttattgtcaagctagccttaagacctcgttcctcccttctaaactattggccaattctttttttttatacttgaaaatgtgccctttatctaatacttattatagcaaatcatgtcgatctctaatggctctgagcagatgcgccctacttggtgcacttgttccactccttgatgcagagagactgtctctcttattttagccttttgcatttaatgctttatatttgccttctctcccacccctatggtccatggccccagtaagaaggcaatatccatgaattattcttctccagaacacaatactgcacaaataaacattttctgattttcaaaacatttgtgcatatatggatgatctgtgtgtgtgtgtgtgtgtgtgtgcattcaaagcacacagcatgatttctaacatacactatgagtgcataacttggtctatgcattgactcagatacaaaataataattcaggaaaaagaaaggtattcaagatgaagcaagataagccatcacactttgaccatcctcaagaagaaattcaacagggtaagtacaattagggatatggtatttcacgtgtggtggtccagcaggatgcagcccatgtgaacttactttcagcgcttgacagacattgtgagtgaaaattattttgatcaaagtcttaagttagatcgcacactaaatatggattcatctaggttacatggtagactgagaaatccattgaaaatttccgcccgagaaaaccagcttgaaaataatgtaagtcttgtcactcgaggagacttggacatattaaaagagtttgatgtggaagtttggaaagcacctataccaaactgaaatattgccaagattattaatgcatcactttgatgagccaagaatttccatctttccccatgggagggatgtctccaatagttggaggtggaaagagggcacagcttttattttaagaataaagaatttcaaaatgaagaaaagaattgcagctaggttttgacagagcctgttgagaagtggaggcaaacatgatgttttataaatgttggtattacaatcagatcacttttggtaggtgccttctgattgtctaattagtatgatgtcagctgggcttgagaatcatttcttttttttaaaaccatctgttttgtcataaaagtttctttagaagccatatgcaggcagagcatttatgcttttgttttttcaaagtgatcttctgtgttctttgtgtctacatcctgtggcataaatcgtagttttaaactatctaggaagaatgcaaggagtccagcagaagaaataaataaataattggccaattaaatcaattaattgaaaaatcagtgatcttggacacaagggaacacgtcacctttaactcgtgtcacaggaagaaattatgttttcaaaatggtgaggttttgaatcatattgccttctgagcctgaattttcctatttaaaaatgggagatttggtaaggaattaattaaactcacatataagaggacaatgcaggagaaactctatattataataaattatatattatagatgaagatattttataaagtcttaaatacaaaacaaatatcagttataacaattgtatatattttaatcattataataaacatttattaaccactagaaagcaagctagtatgagtcattaaaccacaattttctaccatttgttacttcaaaacttcttcccttgtcggtttcttgtacatgtttgctgaatgtgtacatacatgcatgcatacctcgtctttctcaagctagtgaggttaatgactataaaataacattttattttccctttactttaaacttttcccagcataaatctgtcagtcaagtactcctgcctctcgcttgatcagaattacatggttgttcttgagtccttttgagatcccaagagtctggtgacatatttgtaagtcacaaggaattaagaggtcaagaacatcaatatcagttcaggaatgtacggatagagccctatgatcaagcaagaaacaccagctgtaagcaccattcaacgtacttagaacagttcaataaactctgatggatgatgaaaatttcaaaagcatactctacacaaggaacataaagcaatctttttggatagtcaatttcttggtagtaatagtagtagcgttaatgttatttctttacatttgttgagcacttgatgcttttctaagtgctttaaaacatgttatctcagaatgtttagtccccaccagtgcatcccaatttgcagatattaactttgagctatggcagcaaacagctcaagatctacattagctttcggtgtctaagaaatgcaaaacttcctcattcttcttaccatgtaattttccaacatatagggatatattagaagcctggagactcagcaacttgccatctcttacaaaattaatgatggagttagtatttgaacctgagtcttctgatcttttcaccagcatgggtgctgttcaggctcacactttggatcaccctgtgaggctgatgctggctgtctgtgaagcagcaggaggaagagaaacaacccacagcacagaaaacagtgctgctttgaagagtgggtcacaacacgattgccaggctgtgatgcatctcatcttgtaaaagtaaatacttggcgatttccttgtggattccaatagtttctcttgtcacacactgactataacagctgcattcgcttcatgaaaatgggttagagataataaattgaccgaaaatatagaagactgaagtttttgaaagcagtatctggaaacaaattgtttataaattttacctctagaattttgaactccagagcaactcaatttaaaatttggaacaacgataattaccaaagaattttccacagccttaaactagtatttcccaccaaaacagtgatacttaaaatgcatatgaagtaatttattttaggagtattgtgcatattatgcatacacacaaacttacactactatgtaactgagaaacaagaacttgacaaggtgcaggtcaggctaggggtgagaagttggagtgaggcagatacagtgcgactggaagggaacgcagtccagaacagaatcaggtgttgaaactatcaggaagcagtgaattccaactggcacaagtgttgttgttgttttttctcatctccgacttgaaaactgaagggacacacgagtcctttgatgattccttgagtgatccagatgtactgagctggggatgttttggaagagggaattttctgagtaaataataagggacaatatctttgtatcagatgtacataaatgtgataaacatgctttgaaagtgctgtagtcaaattcttaaattatgataaccgagaaaaaagttaagaaaaatggtatatgtataataatactatgttcagactccactgtttctgccattttttttgttgttattttatctattttttcttggtctccttcctttcttctccttcctttcttaacccttccttccttcttttgtctttctctctctctctcgctcactctcttcctctttttctttcttactggcagtctgagtggtaagacagtgctgtatatacagaactgtatcatagaagggaacctagaaattttctagttcagagttttctaaaatgcattttataataaattagttgtatgagatatttttagggggttctatgctaacaaactgaaagaaacatggtgttttatattcctccttagaccttcaccatatatattggcaaattaaagatgaaacattttgcaattaagataactacttaattttgttttatctatttatttccaaacttacactcaatgaccctaacttggataataccaaaagaacttaaggagctagctaccccaaatcactgttgggggaacagacgatttattctatcttgctactcactgcaggaataacatgtcagcactaatgacacatatttgtgaatatgtgttttgggtactgtcaggggctctgagcaataatgaaggaagaaccattcaacaggcacccttttatgggtcagattcgttcctttagtgggctcttttagagggttttattgttaatttcctaccaacacacttgctacaatatattgtataagaaattcataagttcctgggctaaggcatttggcctaactgtctaagccgggatgctgtctgacagatttttcacaaatttatcacactgagtcattgtaagggaattaggaccacaagagaccttctttttggtcctggttaggatctgaacatcagatttctgtttaggcacccagaactggttaatcaaatcataatgactgtattccatactgttattcatcggggaagcatatttatctgagtatcagataagctaccttttaattttttttaactgctatgatgtgccacttaaacgaatgccaagactttgtgcttacaaaccttctacccacaaagaatcctttatcttacctttgcataattgacttatttctaattaaatgtggtatagaaaaaaaaagacctacaaaatttcaacttctatcatttgttccttcctttaagtctctgtgcttctgtaaacatgttagaaccttgagcaatgcattgtccatgctgctagctcttcctttcagataggtttcatgatacattccaccaaccacaacacacacacactcacacacaaacacacaccatccagatctttattctatttcccgattaaatgttcagaaaggcagtgcaaggccaacatctaagtgtgcaactcaagacttctgtccaccttgatattattcagcatttttgagggacagttggtagttacactaactataaatctaccagactatatcatactccttcatcttgcccacaaggatatcatatgctctgctaaaaatcaagaaacactctatctaattcttccagtttaccaatttaataacactaccaaaggaggaacttgtactagtttggctcgtcttattattccaatccatgagagaaatttgtaataaatcttcattgttttatgtcatgacactcccggtattatttatgcaattctgttttcactgccaatgtttcatatcaagtaaaaatgttttcatatcaaataagcatatttgaccactatcaggctattggcatctctttatcttctgaaattttgcaaatattacctcataattattctgaatgctatttgcagcttgtccatttgtaaagaatttgtcattcaaaatattttaaaattttcatgtttgagaattaattcaactcataattcaattttatagttgtttaaaatcttctttgtaaaagaatatgctcagaatattacatcaagaaggcaggttggacacatacacctatcttgtgcctatctcacacaaatcactgaataatagaaatcatgcaaaaagtaaaaataaattgataatagtgttcacaaacaattagggggcagcaatcatcagacagaaaatcctgaaaatgtgttgcatatggaattagtttgctggagaaacaagagtaagccttcatttacatatggaaaaaaactatagaaaagggaaagtcaggttctgtaatatttgaattttgtgatcaacagatacaagacaagccctctggactggtgcttctcaaatgtcagcgacacacaaatcacatgggaaaggtgtttaaatacagtctgattagaaggtctggggtggtggccaagtgtctgctttgcatgttagacaatgctaacactgctggtccttaaacatttctttgaatatcaagggtcttgatcagaggctgtggggggcagagcccagcaatctgtttgttaacaagtcctccagggcattcagatacatgcttaaatgtggaccctctagtagttaagtgaacaggtgcattgagttcagctggcctgttacctacatttaccacatttccattccctcccctaatccaagctgcagggtccacaagtgttttctctgaggcttaaaaccctgtataactctggtctcagaagatattaatcaatgaccctgaggagggcttacagtgttgattcgttatctgaggtagaacaaagcaaatttggagattacctttatccttttaccatctacatgaaggaggaacaaagaaaaggcagttttgctgagggagaaaatctatccaagtgatccacccatgttaaagtgttttttattttggcatttgcctgacagggtctgaagcttgcctgccactttcccattcacgtttcttagaattagaatttatatggagcctatgtctactttcatacaatatatgaaaacacttaagttatcatttaaggtaaaaactattgattaaaatatgtttatcctcttatcttgataatgatgtgatggccaggtttatatttagaattttgtgctgcctggagttccacatttgaatgtggagctgtagggacagctccaacctggcctttaagctttcctcccctgatcaaccacccactccctttcttttcttttttttatcaatctacagcatttggactcaacattttgcaagtaagcatatcttagggatttgtgacaatcttttcagcaatagtagctcattagagtggcaatgctaaatgctgcctgtgggtggttagggcaacagaaggcatacctccccaaaatgacatattataatctccagggagacgtgtgaaatttgaaaaagcttccaagatgattgcctagttaccattttgggatttgaaatctttatatacgttatttccatgccctccttggttaagtctccagatggagtaattatttacaaatgtcaataatatttacttcaaatcttactatattaacaaaaatcataggcaacgttaaagcctcttgaacaaattctttcttccttatataaatcttgtgagtctccatcctggacaagtacttgtatatttttttcacatgtggggctgacactcagctgatatacaccacaaaaacttatttgttaaacaacattatgctttataaatctaaccatttagaaatgatacatgtatatcaagtttattatttttgaatattttattccagacacccaatcaaaaagaaatataaatttgaggttgggcgtggtggctcacgcctttaatcccagcactttgggaggctgaggcaggtggatcacttgatgtcaggggttcaagaccagcctgaccaacatgttgaaaccctgtctctactaaaaatgcaaaaattagccaggcgtggtggtgcacatctttaatcccagctacttgggaggctgaagcaggagaactgcatgaacccaggaggcggaggttgcagtgagctgagatcgcaccactgcactccagcctgggtgacagagtaagactccatctcaaaaaaaaaaaataaaataaaataaatatatatatatatatatatgtatatatatttgatatattaaaaaataaactatattaagaaaaacaaaatgaatacttttgtactcaatttcatcatataattatttgcatattaacttgagggtctttttataaagtaaaacaacagaaacaacgaagagctttttgaaaatttcccttttgttgcattccttctcgaggtagcaattatattaaattcaacatttcacagtgtatggatttttttctaatgccaccactggctggttttgagatttttctcattacccttgatatttttcaatttcattttaaagtacctagttgtgggctgagatttttctttttctttcttttttgagacagggtcttgctctctttcccaggctggagtgtagtggcacaaacaacctgggcaacagagccagacttcaacctcagcctcccagctcaagcaaccctcctgcctcaggaggcaagaagctggtacctcccaagaagctggtaccactgatgtctgccatcactcctggttaattgtttgtttttgtttttgtagagacagggacttactctgttgcccaggctgctctcaaactcctggcctcaggtgatcctcctgcctccacctcccaaagtgctgggattacaggtgtgagccactgttcccaggcctgatttattttattttaaaattacatgttttgagccaggcatggtggctcatgcctgtaattccagcactttgggaggctgaggtgtgtggatcacctgtggtcaggagtttgagacaagcctgaccaacatggtgaaacatcatctctactaaaaaaaaaaaaaaaaaaaaaaaaaattagccaggtgtggtggcgcatgcctgtaatcccagctactcaggaggctgaggcaagagaattgcttgaacctaggaggcagaggttacagtgagccaggatcacgccactgcactccatcctgggcaacacagtagactctgtctcaaaatttaaaaaataaataaatacataagataaaattacatgtttgggtactgttagtgtgttttttgattgaagaactcatatccgtttttaatcttacgaatactctgctatttttttcaaatattgctcatctgctattttttccgtttatttttgtgggattactgtgaagcatatgctatatcctctccttctgtcctaagtgttttgtatgatatatccctttgtccctctgactatggttataggtgagtttcccaggaccatttttctcttttcttttttctttccaacatgtattttaggtgcaggaggtacaggtgcagatttgttacatgagtaaattatgtgttgtgggagtttggtgtacagattactttgtcacccaagtaataagcatagtacccaataggtggttttgtgatcctcactctcctctcacttgccatcctcaagtaggccctggtgtctgtggctcccttctttgtgtccatgtgtattcaatgtttcactcccggtaccacctttcgatttacaaatttgtttttaaattgtatccagttatgatcatcccatctgatgcactttttaatttatattacaattacttaatactatatgtatactttttatttctatgatttgtttatgattctttttcataagacaagaaagttgctttggttgtttttgttttaaattaatattgaattcatcttattgagcactttaaacatcttccaaaatgtttgtcaatactagagttttattgacttttataagatacattttcttcctgtgtttgaaacatttgattccagtctcatttgatgagagtatattttatatttttctccttctgtctctctccctgcttacttttcttggtgctcatatatctttgtattgctgttggcaattgcctctcgtaacccctgagcagccactttataactgggttttatacggtagtgattctggggagggcagatcccttcccagaaccagcagaagtctgtcctcaactcatgaagtccccctccatgtcctctcttctccctatacctttaggttatttagagcggctctgtccaatcaggcagccactagccattgatgaatatgtaagttgaatatttagtcaacggaattaaataaaatgtaaaatgcagttttctattcacactagccaattgtgtctaatggctaccaggaagggcagctctcatgcatcttgacagacagttctatcggatggtgtgactctagagctataatcccaggtgtcgtttctttcttgttgttgttgttttttgtttgttccagcagctggtttttttttgtttttgttttttgtttgtttgtttgtttgtttttgagatggactctttctctgtcaccaggctggagtgctgtggcgcgatcttggctcactgcaacctcggcttcctgggttcaagcgattctcctgtctcagcctcctgagtagctgggactacaagtgtgcgccaccatccccagctgatttttgtatgttagtagagacggggtttaaccatgttgaccaggatggtctggatctcttgacctcatgatccccccgcctcggcctcccaaagtgctggaaccagcggctgtttaagcttggcttgttttctttgggatggatgagccacataccatgtcccactagttgcaagcagaaagccttactttatttccctgtttcattgaatcactttcagccctctgtttcttgcaggtcctaaataaagtccaagttcccattgtctgggtccagggcttttaaatccatggtaacaaaataactcactgctttgtttttctgttccttttctggtcttcaaatcagaagctgctgttatagttttcctttatattttaaccattgtaaataattatttggacccaagagattgctgaagaattgtgcatcttggccaagaagtaaatagtccattcacttttattgcagacttatattccattatattttgaacaacctatatttatttacacatactgattttatggccattttggctgcttccaatttttacaattaataagaatgctgccattaacatcttgcacttctgcacaagtatgcaagttcctttgttggacatatagcaagaaatggagctgccagatcataggatatgtgcacactaatcattgttttatattattcttcagaattgttgcagtgtttaatcactattcctcagtatttctcaagattaagaattgatttctggctgggctcagtggctcacacatgtaatcacagcactttgggaggccaaggcaggtgaatcctctcaggtcgggagttcgagactagcctgcccaacatggtaaaaccaagtctctaccaaaattacaaaaattagccaggcgtggtggcgcatgcctgtaatcccagctacttgggaggctgaggcaggagaattgcttgaacctaggaggaggaggttgcagtgagccgagatcgcacgactgcactccagcctgggcgacaagagcaagactccatctcaaaaaaaaaaaaaaaaaaaaaaaagaatttatttctgcaaatggtggatgtagaatgctatctgattttaatttcatttattcaattattagctcatatctttttcattttttatttttattttattttattttatttttattttatgacacaaatgggtcatttgtgtttcttccttggctgtttacctgttaatggcctttgcttatgatttttttactggtttttacaagttatacattcataaaagtaaaaacattttgtttatatgatttgcaatgatctttttactgccttgggctttcttttgaacttcggtgacttttgtttagaagtgttttgtgtttttattgagaagtcaaatacattatttacttatgttgctatgtttcacaggctgctctctaattattggcctcaattgatcctcttgcctcagtctcccaagttggtgggattacagtcctgagctattttgctcagcagattgattaattgattaattaattagagacagggtctcactctgtcacccaggctagaatgtggtcaccttatcatagctcactgcagcctcaaacttctgggctcaagtgatcttcctgccttagcctcctgagtagctaggactacaagtgtgtgcaaccatgtctggctattttattttttatttttatttttttagagatggagccctgccatgttgcccaggctggtctcaaattcctggcctcaagttttcctctcacctttgcctcctaaagtgctgggagtacatgcatgagccactatgcctggccatatttattcttaaataagaatgtttctgatttgtgtgttattcaatgtattattctctagcttaaatttttaaaaatatattcctcctatgtttaagttgtgtttttcatatttaagtatgtaatatatctggatttatctgtgtgtttgtgtgtgtgtgtgtgtgtgtgtgtgtgtgtgtgagatggtgcataatttaattatttggtccatatttatgattggtggtcctatgatcctttgtgtatgggttttcctttcccctctgacttcttccaatgctacttaagtattatactaattcccacatatgacgatttgatttcctctgttctctactattggtctgtttatcatatgatcaattttacaccatctttactgccattctttatgtcttatagggaaaatcctcttggatccccattgtgtatgtctgtaaagttttatttactttcacagcactctcatacttttgtattctaacttgtttttggatcacacacacctgcagacacatagacacacacatggaaattgcatttaatttgtaaataaatttgaaataaatgacattttacaatgcttttctttctattcaagaaaatgatatgcctccatatttctccatttatagaaatcttcttttagagctccttcatgaaattttataattctctccaaaagaatcctttgcaccattagttagtttcatttcacagtagttgtaactttggttgccattttgaatgggatttttaaaaaatattttcttctaaatatatgttattggaatagaggaaaaatagggattttatatattctataaagcaagattaataaagttcactattaaagagttttttaaaagattatactaaggttaaaaaataacaaaccatatctttcattattctgctggctaaaaatcaccaattaactgtctaattgaagtattgggagcagtatccttgatttgtttccgacgtgaaagggaaagcttgaaatattttcacattatgtaatagttacatagggctgtgaatctcaaaccttcgggtgcatcagaaacacgtggagggcttggttagcaaaaggttatgattctccatggccaacgcttccgaaggagtaaatctgagctgggtgcagataatttgtattccataacaagttctcaggagacgctgctgctggggatcagaaaagaaatgtggtgaagtgggcagagaggctggatgctcgcaatgggagtcagatggcaaagttaaagatgctggtcagggcagggctcactggagcctaagttgtcacctgagcaaggtcttgaggacatgagagcattaggcatgaagattcctggaggaggagcttcttaggcacgtggaacatgagaatattactgatgtgtctgagaaacttcaagagggccatagtggctggagtagtgtggttgataaagaattataaaagagtaatcccagcattttggaaggccaagacagacggatcagttgaggtcaggagtttatgaccaccccagccagcatgatgaaacttcatttctactaaaaatacaaaaattagccaggcatggtggcagatgcctataatcctagctactcgggaggctgaggcaggagaatcacttgaatcggggaggtggaggttgcagtgagccaagatcgtgccactgcattccagcctgggtgacagaatgagacttcatctcaaaaaaaaaaaaaaaaaaaaaaaaaaaatcataaaagacaggcaagagggctaatgggaggccaggaggactaccttaaaggatcatcgtaagcactctgtcttccattttaaatgacttggggatttgctctcaagagtaagataatttgatatgtttttaaaggatcatctgacttttaagagtaagcattaaagggccaggatagaaacatggagaccaagaaaggggttgttgcagtaatacagacaagatttgttgtcatggtggggagaagtgatcagatttcagtatggttaaaggtagaccttgaacttgactctcctaccattggataagggatgtgaaataaagaaaggagtcatggatgcttttggcctgagcaactcaaaaaagattgaaccccttcaaggaaactgagggtttcccttaaatgaggacactgcgtaaagaaaggaaactgttctcctaatgcactgggtgtggaaagtgctgaggatattccaaataatacaaatacagaggatttatcaagtgcatacatgggacttggtattttttatgaaagatttatttaaggactagggaccactgtggacctccttgtgaaaaacataaattgtattttgatatcgtctaatgttaaacccaagtttcttcacaatgctacctctctccctcaattatggaaacctatatgaccacactgaagtttgccatggattcaatttgtttattattctacctcttgattcttgctgccacaaaacagtagtcatttcaactctcatcattttttcctgaagatgtggatggatgccctgctgtcccagagacagacctgaaggagccgccatggttgtcatggtatgctgaatgtacaccatagggctcagtttccctgaggaattaaagtcattccatagtaatatgtatcacctttaacttatgataacaatccagtccagttaatttcatttactttttcattgacagttaaaatgatatgtattactatgtacaatctgatgttttgacatatacatgcaatatgctgtgactaaatctacataattaacatatgtatttcttcatgtagttatcatgttggtgctgagaacactttatatccactctcttaggatttatcaagaatacaatatattaactatactcaccatgttaaaaaaaaatgtggatggatgctccctcaacaaactgaactttcctttccacagtaagatgcctgctgtgagcagctgcagaaagcagctctgtttcagcaacaaagaaaagcatattgcagaactacccatacctcatgcttccgtgtcattttcctttgcatttatttttattattcctcaaaaaacagaaacaatgttttctgcttctgatgatcaaatatttatcttctataaacttgtactttatgcttttcagtttaactacaattacctttggttttccctgggtataaaatggatgataccttaatttaaaaatgaagttttcacacaagataagaaaattgcaaattctaaataaggattgatgtctgttgctaatagtctaacaagaaaaacatagtggtatatcagaggaaatatttttttaattagcaatgtatatagttctcatttaatgactaacttttaactatgtttgaatgaatttttccttgcccacctcatcagtggcacaccgccatgacacagagaaaagtccacatctattgattattaaaaagaaggtagtgaaaaatctattaactatgttttatattatttctgtgtattcttaaacacaaaaatgaaaaataaaaatcactccttttactacaaatgcttaatctttattttctaaataataaataggctagagatgttcatttcctatttccacccaccatcatcagcactatttagtttttaaatagactaaattttttttagtcaatctcaagaaaaaaagagtttaaagtcttgggtgtggctgggcgtggtggctcatacctgtaatcccagcaatttgggagactgcagtaggtggatcgcttgaggccaggagttcgagaccagcctgagcaacatggcaaaaccccatcgctaccaaaaaatacaaaacaattagccagctgtgatggcacacgcctgtagtcccaaccgctttggaggctgaggcacgtgagtcccttgaacccggaggcagaggttgcagtgagctgagatctcgccactgcactccaacctgggtgacaaagtcttggatgtgaatctcaactactttcagtggtgtctctgacaagttgtcatccctcctctgctggagtcctacagtgacagcaattgcactttattctagaacggtacattttattttgtggtttctatgattttcaaatacatatttacattctttgaacatcagtttctttaataaataggaaccaaaatgaaaatgttatagtgatgagacataaggtaatatatataaaatgtgtatcagtgctatcaggattgcaaatattctgtaaatattagttattattttaaacgaatttgtgtcaaatctttgccttgaagtgatacagtgtcactggaaggttaagatatgaacatactttgttagttcaaagtatcatagaccagtgtcttataaacaacagatttttttctcacagttctggaggctggaggttgaatttcaggtcaccatcatggttgtacctgttgaggggcctcctccaggctgcagactaccaacttctccttgtatcctcacatggcaaaaagacagggggctagctctctagcctcttcttataagtggataaatcacatttatgagggccctgtcctggtgacctaattgccttccaaaggccacacctccaaataccatcacactgaaaaatagagtttcaacatataaactttggaagaagacaaacattcattccataatacacacagaaaatgaacttgagattattttgatataaatgcgattctgtagaaataattttaaaaacccgagtgattgacagaataattaattatatagaaaacaacgacacgaagacctaaaggtatgtagagaatattttcagttttaatattcaggtaagttttttaattgggttgggttaagcatatacatatgtatacacacgtataacatacacatatctcatctatatagacacttccccgtgaacctagttgttttgcccccacacccaatccccacccactcacatatctaaatgtatctctgaatgcagatctgttaaggcaggtgggaaccttagagtgaatatagatcacttgtagccttctccacaaagcattagcactgagactcagcgtgcacacatttctacatggcaggtggccccatcgaggtcctgttaaaaagggtgcagatatagaggatgtacggtgccctgctgataagaactaaacagtgacccctgataaattaacgtttctttgtccaaaccaaaatgaggccctgactcatttcaggagaggcacttataattattgaggaaaggtgttaggaagaaatcacaggccctagagactctcaacaatctgtatcaataaagtctaataacatcataggaagcaaattaaggtggaaactgattgctgctgattgcaaaggtctttatacataatttaaatgatccataaagagcaactggtggactagtctccaaaataaattatcctgtaacaggaaattcaaatgttttgatcactagaatacaaatgataaaattacataatatgaaaacataattttaatatacattttactgaggaaagtggtttctatttaatcagtgaaaataagtttattaatatggaattgtatagtctttcattggaactagttatttactagttcttttattggttaatgtgagctaaacatcaaaccaaattctgtaccacttattcccaaagacaccgaatgatagagtggcagtaatcaaaataaagaaaaaaatacaataccttaaagatgtaggtgcattgaaattaagtaagctttacatctagaaacaattttggtctatctgaggcttgattctgagccctgagcttgtattatataaataattttttatagtgaaaagtgatcatgactttggaatactatgtaagcaatgttttgggcattatctgtttctctagtgggtccatccatccaggttcattggtttgcagaaaatatataaaatgaagcattggaaaagctttttttttttttttttttttttttttgagatggagtcttgctgtgtcgcccaggctagagtgcagtggcttgatcttggctcactgcaagctctgcctcccaggttcacgccatcctcctgcctcagcctcccaagtagctgggactacaggcacccgccaccacgcttggttaattttttgtatttttagtagagacagggtttcaccacgttagtagtagatcggggtcttgatctcctgacctcgtgatccgcctgcctcgacctcccaaagtgctgggattacaggcgtgagccaccacctgtggccggaaaagctttcacataatctccaagcacagcaggttttaagtaatctgagtgtacaggaatctctcaaccaaggggttcttgggcttctactgtaacactcccagtggcagagaccattgtgtttctgtatggttctattgaaaagtctttttttttttttaatagtgagccaatgtctctgtccttccatttccactcacctgtatgtcaaagcctcacaaaacaagcccaaactcagtgtcccaagacagctatcagctgtgggataataaccaccacaccctcttcccgaaaaggagactgactccagttattctattcactaacatattcctctgagtaattcattttcaatgtctctgttaaaggaagacatttaaaaaaataaaaataaagaggacgagatccacatatactagtctgctagctcctatctggtacacccactggctttaccctaatttcttcaactcaaatatctccctttctcccttcagcctaggagtgagatggtttcattctgttgtcaactcctgttttactttatcatcccttgcttagcttctgactctttcttcacctgtgcaatcaattgtctttattaaaagatacttgaagaggtttctgttgtggtttccgtataccaagaacacgatgatcatatttgtgattctgattacctattctttgaggttcaatgtctacttcttgtttaaagcaactgttagtattgacattaaaagttctactatataaattgacatctgtggacaaaagaaaagtgatttaaaagtttttcaatttttgacaatgaaaactcatggtcaaaaaggcctagacacaagtcacaactgcaaaccttatttgctttgcaacttgctcaaattattccaaatctccattttccatatttaaaataacaaaacaatgctgacttaacaacacagggtggaatatgtaggtaattatgtcaagtgtctagcacagaatctggaaaattgtaggcacttgataaacatgacttctgccgtttctacataaaatgatgtagattaattccaagagccccagtcacttcttatttacttctgacaaatgatttttttctaaagtactaattataaaattgactaatgatgttgtagcctagggaagttttagagtaggtcattaaagttgtaattgtagtgcaaatttttttagatcgaggtctggtaataaatcccccagaaacctttatataatgtagctttctttatttaaaaccaaggcacagaatgaaaaaactagagctttgtatcttcaaaaacgtttatgagctttataagtaatgagtaggcatggctctcttttgtgcaccagaccagggccattagaggaaatgagtgcccagaggggataaatcactctccccaaagtgcagtgaggaagtagtgaatgggagtgtgtatacctgtgcacatgcagttgtgtgagagtgagagtgtttgtggtggaggtgtgtgtattggaagtaatagtgtagattccaaaagaagatggatgcagaggtttgctattctagttttgataaatttaagacctctattatgtggaatgattaggggaaaaaccttttgctgttagtgttacaaaaacatgcatgagtgtttatgttctatagataaagatacataccttaatgtatgctatatagaatatatggtcaagccagctgatctgtaaacctgtgtgctcttagatccatgtcctggcccttcttctattctgttccctatttcagagcaccacatttcttaggctctcttgaccaacggctttgaggggagttggccagtaggaagcactaaatgtgaaggctctctatctttctgttttgtctgtttttctggttcacttccaacagcagctaggttcatctagggtttcagctcctgtctgatagacccattggttttactttagtctctgtgactcagacgtctccctttctcccttcagcctagggatgagaatggcttcatgctgttgccagtccctgttactttatcatcccctgcttagcttcttgccacttcttcagctgtgtagtcaattgcctttattaaattttctcatttcagatacttaaagaggtttctgttttctgggtataccaactcttgctttctcagtatatttaatattgagtgagcatatgaattgagagattaggatattagtacatattaaatctaaatctatattaaatatcactgtaattttcctttagacattttcagattgacttaactgtgccattaagtgactgtgggaaatcattaaactcgtggtcttactttaacctttatctgtacaataagtctaaaatgataggcttgacttacctcaaaagatagttaaggctgggcacagtggctcatgcctgtaatcctagcacttcgggaggccgaggtgggctgatcacctgaggtcaggggttcaagaccagcctggccaacatggcaaaaccccatctctactaaaaatacaaaaattagttgggtgtggtggcgcattcctgtaatctcagctacttgggaggctgaggcaggagaatcccttgaacccgggaggcagaggttgcagtgagctgagattgcgccactgcactccagcctgggtgactggtctcaaaaaaaaaacaaaactaacaaattaataataaaatggagcacttgagaaatatgcataacactgtgtaagtgctcaagagcaacaagagaaagagaaataaacataagtctccattgttggtttaatgttgaaatcaaatctaagctttaacatatgcttttcatgtgccctagaacaccgaggttgattcaacttcaatctctaaacctacaaaatagtggtaacaacatctccttctcaacagtgtcatgagggttactttacctaacctttgtaatgctctcagcacatggggattgcatagaatgggtcttcaaggaggttggttctttcttcatctattcctcagcaagatgtagaagttctttctgatagcactccctggtcaatttattcctaagtaaaacacatatataggagtattttatacatatatatatatatatatatatatatatatatcacccatcacttgattaactgaatctctctctctcttttagcagaaactaatcaccatgtatttattgagttcaagtcactgctcatctctgagattccatttcaacttgtcaaacactccagttaaatagtattcctctgaatttcactttgaatttactgtatatggatatctatttaatttttgccaacttacttgttccaggttgcattttgcttttttatttttatttatttgtttttgtttgtttgtttatttattttgaaacagagtttcacccttttttttttttttttttttttttttgagatggagtctccctctgtcacccaggctggagtgcagtagcgtgatctccgctcactgcaagctccacctcccaggttcacgccattcgtctgcctcagcctcccgagtagctgggactacaggtgccctccaccatgcccggctaattttttgtattttttttttttagtagaggcggtgtttcactatggtagccaggattgtctcgatcttctgacctcgtgatccgcctgcttcggcctcccaaaatgctgggattacaggcgtgagccaccgcgcccggccttgaaacagagtttcactcttgtcgcccaggctggagtgcaatggcacgatcttggctcactgcaacctccacctcccgggttctgtcaattctcctgcctcagcctttcgagtagctaggattacaggcaccctccgccacacctggctaatttttgtatttttagcagaggcgtggtttcacggtgttggtcaggctcgtctggaactcctgacctcaggtgatctgcccatctcagcctcccaaaatgctgggattacaggcgtgagctaccacacccagttcttatttgttttaataaaaggtcaacaattttatgcatatcactatttgagagaatatcccctacgttgccttctgtagcttacctatccttacacatgtgtttgtgtaatttgcccagtttccacatgacattcagatttagaatggtatgtctcattatgcaatcttgcccaagctagtgactttgatattgccacctctttttgaccttgctttgttacaagaaaaaaaaaaaaaaaatgggaggggacatgttacccaaactctagccagttgaattgtgctgactgctttccaaaagaacatatgttctcactggaaagattcagaaaaatttggcatcagggatggcatgtggaatttaggaataagtctttgctttttaagaggaagtatgaaatagaagaaagtacattgaatttagaaacagaacatgtggggcctggttgttgttcgaccccttatgccctttgatgtcttaggtaagtccctcatctttgttgaaacatgctctttattatttcttctatctccacaattccatggtattagaaaatgtttatatttgagacaaaacctgcacttgcatctatctgctttaatttgaatattatatttttgtgtctaagatacgctataatattgagcgattcttggtattgaaaatcaaaggaagatgagacattataaatgggtcatagtcaacaaagcaaagaatgtgcaacatttattaaaactatttgatccatcttatattgcatcatcattaagtgtattttttagttttaaaaatgcaaaaaaatatagatgtggtcataatgaaaagcaatcagttatggacctatttttctgctccaagcccccacccctaatctcctcattcacaccctgagctcaacacacacaggatagcttattaaatcacttcacttggggtttttctggttgttaatttcacatatataaatagcacactaagcctctatttcttgctttatctactttagatatggagcattgattttctactgataatgagaatgaaagtcatttactccgcaccccacttcttctgtctcctccctgactttatcattattctcagtttccaaagttggtcttcatgacacacctaattgaggataatagtatagttaagaaacagggcttactgtggaaagcagtttggagatttctcaaaggacttaaaactactgttcaacccacccgtcccactactagtatatatatatatttaagagaaaataaattgttctaccaaaagacccatgcacttgcatgtttatcacagcactattcacaacagcaaagacgtggaatcaacctaggtgctgatcaacagtggattggataagaaaaatgaggtaatatacatcatggaatactacacagccataaaaagaataaaattacatctttcacaaaacatggatgcagctagaggccattatcctaagcaaattagtataaaaacagaaaaacaaatattgcatgctctcacccatgaaaactgaacaatgggtttacatggacataaaaatggcaacaatagacactggggactactggagaggggaaggatggagaggggcaagggttgaaaaactaactattggatactatgcttcgtacctgggtaatggggtcgattgaaccccagaatctcagcatcatgcaaaatacccatgttacaaacgtgcatatgtacaccctgaatctaaaataaaagtttaaattatgagaaaacaaacagaaaatatatttgaaaaatatttgtatcattaacgtaaattcatgttgaaatgataaaacattttgccaataaaagtaattttaacttggaaaaaaaaatagaatgatagtctataaatgtgtgataattcctgaagcctttggaaaatacgataaattttaaaaataagatttaatgatttgtctttaaaaacataaatagtccaggcgtggtggctcacgcctgtaatcccagcactttgggaggccgaggtgggcagatcacttcaggtcaggagttcgagaccaaactggccaacatggtgaaaccccatctctaccaaaaatacaaaaattagccaggcatggtggcacacacctgtaatcccagctacttgggaggttgagacaggagaatcacttgaacctgggaggtggaggttgcagagagctgagatcacgccactgcactccagcctgggcgacagagcgagactccatctcaaaaaaaagtaaataaataaaaaaaatttaaaaaataaaagcataaatgaatgaattgatgaataagtaaatagcttagcttcagaaaaaaaaagaaaaaaaaacaagaaacaggaatttttgtataaaattaagattgctctagttatataattccctggttttcccccaacaaattttcaaacttacaataacaattatatttgactgagtgccaatttaaacctataggcctatgctactttttttttttttaagaccagacctccctttcatctcagtctgaggtacatgaggcttttaatatgaaatcactttccattcggtccaaagcttccttgttgctgatgaatgtcatacataatgaaagattatatccatttatcctcagcagtaaatcatttatcacacaagggggatatattattgtgaattctgatcaaagctgcccacttcctttagccggcagaaatgctgcaccctgttagttgattgtacaatatcctgggagaaatagggaaaattatgctgttgaatgagggtttggcaactctaggggtttctaaaatgccttgtagaaaaatcatgtttcatgtagaaccttctatgattcaggcatgtgagctgtaaaagtcttattttgccttcttcgcttaattaaatcagaaggctgtgggacttttttcagcttgctctgtgatgtctgcaaacagattcctgaatgacatcctgtggacactttgcccccttttttagagagacaataattattaccacttctttttgaagcatgctgagtggttttatcagttgtttgctaatgagctctgtctctcctttataatgtcaatcataaggatgccttttaaatacaacttatctcccagatttattttcttttcattcttcctgatcaaggtacgtactgttttgcttcagggaatcatctacacaacccaggcagagaaggctggcctctttgatctcttgtggataacacactctctccttctgagaacagagctttccaaaaaggacattaccaccctccagatgagtctcttcttgtgttttatctgtgattttaggttatcattgccctctgttacacgtctgtattcactgcttttcaaattcaatagcatgtaagagtctcagtattaaaattatcctgagtcaagtgagatacagaatgaagcaggaacaataggtcttttcttccttccttctctcttgggcttctggccagcatgctggtatggtttgttcagattttatgcaaagctttacctggcgattcaccaaatcaagtcagaaacctgcacctaacatttataaacaacatttcttcatttgatcatcaccttattcttgaagtagctttcagtgctttggctatttaagaagtcagtattgaaattcatattctacccttgcacactgtgtgagctcactatatcccttgtgtggtgtatagaggaagtataattttccccaagtgccttatccttaaaacaagagatagctaaattgatcagaacgggatatcgttataggaaaaattgtatacattaaactttaggtgtttctgttaatagttcctactactgtgactattcagattattgtattccaacataggtaaaattgatggatttagcaaataaaatacagtacacctgttcacatctgaatttcagataaacaatgaatgcatttttagtataagtatgtcccaaatattgcttctaggacacatacaagaaattgttgtttatctgaaattcagatttgaacaggtgtactgtattttacctggcaacactacatatagtagaattcacgttctagtctttgctagtctgtagatattacgttcccctacttggtaactcctgtgaactgaattgtactgcccctacactgctattcacacggtgaagccctaactcccaatgagactgtatttggagataggatctttaggggaaaattaaggttaaatgaggtcacaaggatggggccttaatcctgtagcactgtgggcttataaaaagagagaatctctcttaggtgaggactcagcaagaaggtggggtctgcaacccaaggagagagccctcatcaaaacccaataatgctgcacctgaatcttggactcctagtctccagaaatttgggaaaataaatatctgttgcctaagccacctggtctatggtattttgttacagcagcccaacctgatttatacagtaactttaggatgtcttactagggcacagttttatgtttcttgctgaactgagatctagcaagcatagtcattaccttagatatggtatggctgtgtccccacccaaatcttatcttgaattataacttccataattcccatgtcatgggagggacccagtgggaggtaattgaatcatgggggcgagtctttcccgtgcggttctcatggtaatgaatgggtctcacaagatctgatggttttataaatgggagttgccctgccctgcacaagctctctttttgcctgctgccattcatgtaagatgtgacttgctcctccttgccttctgccatgattgggagcctccccagccatgtggaactgtaagtccattaaacctcttttgtaaattgcccagtctcgggtatgtctttatcagcagagtgaaaatggactaatacattaaatttgttaccagtagagcgggaccctgctgaaaagataactgaaaatttggaaataactttggaactgggtaacaagcagaggttggaacagtttggagggctcagaactagaaaggaaaacacaggaaagtttggaacttcctagagacttgttgaatggctttgacaaaaatgctgatagtgatatgaacaataagttccaggctgaggtggtctcagatgaagatgagaaacttgttgggaactagagcaaagctgcctcttgttatgttttacaaagagactggtggcatttttccccttccctagatatttgtgcaactttgaacttgagagagataatgtagggtatctggtggaagaaatttccaagcagcaaagcattcaagaggtgacttgggtgctgttaaaggcattcagttttataagggaagcagagcataaaagttcagaaaatttgcagcctgacaatgtgatagaaaagaaaattcaattttctgaggagaaattcaagctggctgcagaaatttgcataagtaacaaggagccgaatgttaatccccaagacaatggggaaaatgtctccaaggtatgtcggagatcttcacggcagcccctcccatcacaggcctggaggcctaggagaaaaaaaaatggttttgtgggccaggcctagggcccctctgctatgtgcagtctagggacttggtgccctgcatcccagctgctccagccatgactaaaaggggccaaggtacagctcaggccatggcttcagagggtgcaagcaccaagccttggcttccatgtggtgttgagcctgcaggtacacaaaagtcaagaattgaggtttggaaacctctgcctagatttcagaggatgtatgcaaatgcctggatgtctgggcagaagtttgctgcaggggcaggatgctcatggagaacctctgctagggcagtgcagaagggaaatgtggggttgaggccttcacacagagtccctactggggcactgtctagtggagctgtgagaagagagccactgtcctccagaccccagaatggtagatccaccaattgcttgcactgtgcacctgaaaaagctgcagacactcaatggcagcccaagaaaacagctgggagggatgctgtactctgcaaaaccacagagatggagctgcccaagaccataggaacccacctctcacatcattgtgacccagatgagagacatggtgtcaaaggagatcattttggagctttaagatttgactgccctgctggattttggacttgcatgggacctgtagccccttcattttggccaatttctcccatttgaaacaactgtatttacccaatgcctgtgcccccagtgtatctaggaagtaactaatttggttttgattttacaggctcataggcagaaggtacttgcctcgtctcagatgagacgttggactgtggacttttgagttaatgctgaaatgagttaagactttgggggactgtagggaacgcatgatttgttttggttttgaaatgtgaggtcatgagatttcagagaggtcggggtggaataatatggtttggctgtgtccccacccaaatcccatcttgaattgtaactcctgcaattcccacatgtcatgggagggagccaatgggaggtaattgaatcgtggggtctggtctttcctatgctgttctcatgatactaaatgggtctcacaagatccgatggtttaaaaatgggagttgccctgcacaagctctctttttacctgctaccatccatgtaagatgcgacttgttcctccttgccttctgccatgattgtgagatctcctcagccatgtggaactgtaagtccattaaacctctttcttttgtaaatttcccagtcttgggtatgtctttatcagcagggtgaaaacagactaatacaacctttctagtctggacatgttagtcaattactcttctgattctgagcaagtagagacaactgaaggaatctcccaatggttgtcccttaaacgtcaaattctatgattggctaatttctcaattttgatcatatcataaatcagaacaataaagagaaatcatggggggtagatgtgacaatgaacccagcctactattggctgaaaaatattaaaggcactgatgggaacatttaattgagtagacaaatgggggagatagcctgactgtcctctgactttgctgttagcatctaaatctacctaaattattggatgtatttacaaggaataagggcagtgtttgtttgtgtgtgtgtgtgagggtgtgagtgtgtgtaaaggtacacagagcatgtactaaatcaagattcagtaaccccatttagaaaggagcacctgagacttctgagaggttaatcacaggcctccatcacccttctaagtggcagaattggagaccatcctgcagccaaagacatgccttttcctccataactgactacctacattgaaaactagaatctcacatttttcacaatagatcttttgtatactaagaaatcagtaacagtgcatttcctcaaattgacatgaagcaaaatttcatccatcttccaacaacctgtcattgttaccccctctaaaccttttcttcttcataagggcaattattattttattacctctggtatgatattaaaattatgaagactttcctccaaggggccaccatattactgtctcatttacattcttatactaaaaatagatttttttttataccagatgtggtaaaatcaaagctaagttagacagaatgggtgattcctcccacatagctgctctggagaacatcgctatgcaccctgaagtgtacagggtgttcatgcccatgttaggtattttagttttgttaatgaggtggtgaggttgaggtgaagctcatgactaagtagaggcagaaatctctataaagaccaaatgtttattcagactgatgtgagaactctttagcttctgattctccaagaacaaatgtgtcataattagaagtaaaaaattgatgtgaatgggttgctgtttcccaggtactaaaagtgaccaatgaagtgtacggctagctgctggacacaagtccctgatactcaaggcctggttgagaagaccttgtagttgagcaaactcatttgttattatattttttaactcatcaaacttgaacttgttctttttcttttccttttttgtggctcaaatagtgatgcatgcagcacaacacctggatttgggcaaatgattttaaattcacacgtaaaaaccatagcaattttatgatgaattggcctccatctacttctgaatttaaactttgctaaagggaaaatccctacattttcttttctttttttttttcctttttttttttttttgagacggagtctcgctctgtcacccaggctggagcgcagggggtcgatctcggccaatgcaagctctgcctcccaggttccagccattctcctgcctcagcctcccaggtagctgagactacaggtgcccaccaccgtgcctggctaattttttgtatttttagtagagacagggtttaactgtgttagccaggatggtctcgatctcctgaccttgtgatccacccgcctcagcctcccaaagttctgggattacaggtgtgagctaccgtgcctggccaatccctacattttcttaaaatttaagatataattccattagcaagaaacgtcagagtgacattttaagcaatgcttgcatcagacaaaaaatgtatgatgtatttgaaatctattgacaacacattggaaaaccttcaagagttctaaagcagccgttactctgaaatttaaaataatcccattttagattctttcaattatagttaagaggattttgtaaaggctgtacctgtagccagtctgtaggtaattttaataacaagtggttaacttaaagatcttcctgtgttaattagtgttcttttttaaataagaattattaattaaattctcaattcagcaaaagaaaccttattctttaatcaatgtcacaaaattctccatagtcaaacttagatctcagtttccgtgatgagtggctggggaaaggaatgcgttctcccaccattaataccttttgagccaataactctaggctgtagatccttagctagaaacgtttttgtccacccagaacacactttgcatttagactgaggcctcctttgaaattctggctcctacatttcctatctccttgacactgggcaattcagttttccttgctgagaatccatcctctgttttttgtttgttcattttggttttggttttggcttttaaatcgagggtagtctgcagtcaagaaatatcactggaagctgggtgcggtggctcacgtctgtaatcccagcactttgggaggctgaggcaggcggataacttgaggtcaggagttccagactagcctggccaacatggtgaaaccccatctctactaaaaatacaaaacttagccaggcatggtggcacatgcatgtagtcccagctactggggaggctgaggcaggagaattgcttgagcctgggaggtggaggttacagtgagccgagatcatgccactgcactccagcctgggttacagagagatactctgtctcaaaaaaaaaaaaaaaaaaaagaaaatgtcattagtctttgaccaatatttatccagtccttatccagccccagttcctagtaatcaccattctactctctgcttcagtgagttcaacttttttagattccacgtatacgtgataacgtggtatttgtctttctgtgcctggcttatttcacttaacataatgccttccagtttcattcatgttgtcacaaatgacagaatttcctttttttctctaaagctgaatagtattccattgtgtatatgtagataccatattttatttatctattcatctgttgatgaatgtttaggttgattccatttctgggctattgtgaatagtgttgatataagcgtaggaatgtaaatatctcttccacatactaattttatttcctttgtctatatatccagtagtgggactgcttaatcatatggtacttctattttaaattttctgaagaatcaccattctatgttccataatggctttactaatgacattcccaccagcagtgcacaggaggaataatttcaagaaatctactgcataatatagttatgactatagttaataacaatgtactatatacctaaaaaattgctaacagtagacattaagtgttctcaccacaaataacataaggtacaatataggttaatagcttgatttagccattccacattgaatacatatttcaaaacatcatgttttaaaacattaaaacatcatgttgtacattataaatatatataatttttatgtcataaaaaaagaaatgtcattatcattctttagtgacaattcacctgaagtcttcttacccatagttgatgagtgtcttttaaattataaagctcaggaagtatgcctttaaatcactaaccaatatctgtgatatggtttgcttaagaacatttttagattggagaataatttacaaatctaggtctttcatttttaaaataaatcatggtgttagttcatgatatttgggccatatttttaaatcctaatcctgggaaaggtggttaggtatatggcaatttatgtctccactgaatttccatacagaatgccagaaggtaccacagataaagcaagagctttaaggtcaatcacagctgagtttgtatgtagttcaagtacttactggctgtgtggttttggggtaatatacttaacctttctcaatctctgtttcttcagttgaaaagctgggattatgctttcaaattcaaataataataaaaactaacatttcttgaatgcttatcatgcaccacaggtattgtatcatttactcctaataataaatccagggggtggctactgttatctgcattttacaaataaagaaaggaggcacaaaaaggcagagcagccaggcttcaaaaccaggcagagctccagaccaccttgcctctcaaatgtaaacttgaaatgccagacgatctttccattttccccaaccaaggactgacactgaggctgaggagaattggcagaagagagagaagaatatctggagggtttgttcctttttcaaatcagcatttaatagccctgttaaattggcaggcgtgtatattactgaccatgtttctattttcctgtaacaccaaagagtaaaggccattttttttccctatgaataaaagttgtcacggtcaggaaataaaccatatagtttgtctacaaccatttcccttgtgaagctaattgattttggctagttaaaactttatgtctaaaatcaaggtccaaagaagaaagtatgtataccttctatagcatttataaagagaccaggcactatgcaggaattggagcaaacatttgaacatatttgtattcttcatatatttgtctctataaattatataaaatccatttttgtagatacagagtataagattcctaggcataaaaatgactaaaatgcaattgtatataatatcagctacctgcacttgtttttctccttcctaataccatctcatttttttggggggttgaaactgagaaacaaagatattaaataattttcctaaaatatacccatacaactaaatgggaaagccataatataaaccatccctcttaatcatcatgatattaataaggaagacaggtgctaagcaaccatatgttgactgggctatctatgtagataatcaagtccctgagaatgaggacagagtagaattggagagtgtgacagtgaagcaacaataacacctttcatcaatgagtaaatgaccaggaaatccacagatgtggagcaagagagtagcacagttctctcaatagaaccatgttagtgttgcttgtttttgtatctgtcttgttttgttttcctaacaagaggaagaaggagaaattgaagaatgatctggaaatgtaaggaggctgttgattacaactgggggttcaatttttcactcattgtcatattataagccgtaacttagttgttattcaggaaataggctgaaagacactggcagatgagaattgcagagatgggaatgctctgaagttagcagtgtggccaggtggccaggataatcacttttagctggccaaaagatgatcatttctgtgggaacatcagcaagtgagtgacctgaccattttaagtctcttccttagggtcctccacatccagcctgggtaatatgttgctcaatctgctttaccacaccaggcaaaacaagtattgaatttcaaccaatgatcacagatcttgtattgtctcatccttgctggtactgttcgcttttctctggctcaattgttgccttttaaaactctttacttaaaccagccactgggcttttccttggggacaatgtagaagaggaaaacaatgatagaagggggtgctttttatttcaggtacagctgggcaggtgggatggatcagggaaaagctccaaggatgtcaagagtagaaatagtgatgtctacctttgaaactacaaaactccctacacaaccaagtgattggagctttgaaagcaatgcggagtagaaaactaatagaatatcaacctagttaaggcaagatttgctgtggggaagggaaggtcctgagcctctatttggccctgaggcttatcaacctgatacttcagttgggctcagaaagactcctgccccctccccattccctccctcccattgtgagggaccaatctctcttattctgtgttttcttaccatctcttccaccacttacctgctctactctgctttgcacatggtctcctcaactatgcccttccctacagccttttaaatgtggaaaagaaacaaaacaaataacatgatcaagaacttaccggtttccaggccaagtgcagtggctcacacctgtaaacccaaacactttgggaggccaagacaggaggattgcttgaggccaggaatttgagaccaacttcggcaacctagcaaaacccccctctacaaaaaattaaaaaaaataactgagtatggtggtgcacaattgtagtttcagctactcaggaggctgaggctgtaggattccttgagtctaggaggtcaaggctgcagctagccactgcatgccagcctggacaacagagtaagactctgcctcaaaaaaaaaaagaaaaaaaaaagaagggaagggaagaaggaaggagggaggaaggaagaaagaaagaaagaaattcactggtttccaatgtaacaaatcctttatctcaaagtagatgtacacttagagttggagacttttttaaaaacaattacaatgtctcggctcttgtgaactgagtttgctgtatggttatgtcactgtggataatgattttctcatttttttacacaatgtttatcaactttggctgtgcttcctctcctgagcatgctccttgttttgtaaaacaactggggaacattgagatttttcatataatttctgtgatgccaggctcctaagggataaagaaatacaaagaacagtgactggacagattgagtggagctttgaaagcaatacagagtagaaagataatagaatatctactataatgacacatgcacaagtgtttttattgcaacactatttgcaatagcaaagactaggaaccaaccaaaatgcctatcaatgatagactggataaagaaaatgtggcccatatacaccatggaatactatgcagccataaaaaagaataagttcgtgtcctttgcagggacatggatgaagctagaatccatcattctcagtaagctatcacagaaacagaaaaccaaacaccacattatcactcataagtgggagttgaacaatgaaagcacatggacacagggaggggaacatcacacaccggggcctgtcagggggtgggtggctaggggagggatagcattagtacaaatacctaatgcatgtgaggtttaaaacctggatgtcgggttggtgggtgcagcaaaccaccatggcacatgtatacctatgtaacaaacctgcacattttgcacatgtatcccagaacttaaaataataaaaaaaagaaagataatagaatattaacctggttaaggcaagatttgtgttttttaaaacatatattccccattaaagactacacatgtacttcttaatgttattaactttgtcatgtattaagatgaacagaaaggcatttctattatatgaattttttcttattcttgtgtctttcaaaaagaaaaaagaaaataaaacaaacaaatacacactcaactctcccccaaaaaaccaaaacaaaaacaagcaatgcaataatatttctcaaaagatatgcttgacacactatcagaagttctgccaacttcaatctatgcactagaagtgcattgaaaacttttattctttgcttcttgtctttaatattgttgtaaattcaatccacttcactggcattacctgctagcaacattccatcttcacatttggatgagtgtgaacttatcaaggtgacatatgtgtgatttttaatggaaattttactttgtttttcttaaaactgggtgtcaattagcagtgactcgcctccttaacaaaggaacagggtttgctgcctgcccagccacacagcccctggggggcttcctagcctgggctaggctgctgcaacatcatcacactttattagttacagcacagagttatggaggcaggaggaaagtactcactatgcaattttcctgataccccatgaggcctgagcacctcaaggtgggttagcactcatggaaaatcagtttaagatgggaaaatttcaaacatctttccttattttctttcccacacacaaatagaataatgcattttaagtaacaaagaacacttaaaaagcaaaacaaaaacaaaaagacacttatccttaaaagccaccatctccttaggatattcctcttatattaaataaggatacaaagagtaaagtgtacttaaaatctctcacaaagattggaaataaaatcttcaaaaagtgaatgcatacaatagcacatacgtaggacgtaattcattattattgggaaatgaaaatgaaagcaccatggtacgataattctgaataagaacaagctaattacattagggcagctttcagaaaacaagaatttatttttttatgacaaatatgactcagtacaaagtacacaaagtattttctgactcttactgtgatatgcctactttatttcaagtaaaatatatgaatttttaaaaggttatgaaaatgtgtttatgctttaaaaaaatcatttcagtaacatgttggatatctggaatatccatatattggaggtctgtgttctcagtctacaaggaaaattgccaaatccactctagagtgccaggcttaaaaaggtgttgaagagagcctgcccgattacctgaattccaatttggctcacaatgaaagatagaaaaattacctagatgcatttcaatgttgcttctccccttgcaatagaccttatttaatagcttattacactcagaaaacaaagcatattttaaggaaagaactcacgacgcatggttcctgtctcttgacagaacggcctctttgaattcttttgtcaatttcatagatttctaacaagcagagaattgttttttaaatctgattttttttaatgccagcagcactatttcctcctcttaagtaggacagattcatcctttaagcaacaatggatgcttccctgctgaactcgagcatgacagattaagcttcgagcagaccagtaaatgccacctccccacttaacaaggctgttcagagccaggcgtctggggcctcgccgtatttgttcctggaatcactgtctgatgagccactgctgtccgaggtggccaagcagccctgattgagcgagctatgtgaagacccgacaggggcctggcagggcggcgggggcatgcctcctttttggtgcttccaggcaaattccttgcctccaaattgtgcccgcctcaggacagttggcttgtacaatgcctggcagaaagtagacactttgcacttgtttactgaatataaaagagaaaaatagagagagaaaaaatctgagtttagagatgcctttcagaccttgccggataaaatgctgttatttctggcaaagtggtgaggtgacactgacttggaagaataactaagaggttaaaaaaaaaaaagtaggactaacagtgaacaagctaataaaacacatggaaaccaaattagtggtagccaaaatcaataatagatccattatatttcaaaatatcttttataagaaaatggcacttggaatatgtttctaaatgccttttagagaccagtgtgttgcataaagaaaaatacacctgcatccagaattataattttaagaaccattatttagattgctgtgaggtatcttaaaatgcgattcaatttgctccttagatattgcatatcaaactataaaagcaaagctacattgttggctttctccctttttggcaaagaaatagaattgagaatctgcctgttgaggtcagaaacagactgaatcaaaaaatatgaaagcatgaatgtactgttctcacatttatgtaattgatggctattttacttgttgaaatcttaagtctttcacaaccacatgcgtatgtttgtcatttatccccttttctcaggtgcaaagaaggctaccaaggagtccgttgtgatcaatttctgccgaaaactgattccatcttatcggatccaagtaggtcaagcatttttcttctctctaatgcaatatataggcagcgtttattctgagcaatggttgttaactcagctgaaagctatatttcagtcttgtgtctctgaaagctgccaaggacagaagctgatggcagatgttgatgttcaaagcatcctcagagctggctcagtctaggtcttctctgacgatgaggcctggcttccggattccaccttgaacccctgctgggaactcccaacaacccgggcctccttagctttccttctgcccagccacgtaccacctcatttcaaaagcagggatctagaaaaataacagagcttattatttacctgaaataatgttatggaaactacagtattataccgcttcttacgctttggttgttaatttatgatagtattaaaccataccttactaaagtaagaaaacgtgtacgaaatcatgtaagaagttttcaagcagactttgaaaactccatttttggcaacactatttgcatatcagtgattactgtcctaaggacaaattattttttctccattcatggaagaagacaatttgcagactaaaaaatatggctagtcattagtttgtttgtatggtagtaaaagtaaccttttatgcttaaatgcccaattctagtcaaatgtgaaatgtttatctttaaagaattctctgttctttcaatagctgctagaattgaatcatgactaaaaaatggggattttcattgaatcagcgatttagtttagtgaggataatgataggcattttgcaattggaaaggccaagttatggttttctgaatatcatacatacgtaacacagacttcagtaaatattttgtactgactaaggacagaggtcgccctgcctgtgtctgtgcgttttgctgcataatgaacgtgtctaggcatcttccaacatcttttcaaaatgcatattttcatttccccctgaatttctagctacatttactcaagtaaatgcaaagttatttgaaagaaaaaggttttgtttaatttaatttaattctattttatcttgacgaagcaattcaccatacagtaactactctttctttgcaaatttagctttccttgagaaaagtgaaggttgccacagggatatctctatttcctgaaatgtgagacacagttctctgggaattacccaaagaggatggtattactggagtttttggtatcttatttatcaagtgatttggaccacttgctcaggtggcctctgaaagggtattcatggttatgatgtgagacatatctttggcatgttaggaaacttgcataaaataatgggcttgctgatttctttctttttctttctctctcttttttcctcacttttcctaatgtatctagtttttctctttttctttctctcttttttctgtttttatcccttctcttttcctatttatttcccttcattattttgtctcctttaatataatacttcttcccttcctccctctttcccttcctccctctttccctttccccctttcctcccttcctcccttcctctcttcctttcttctttctttcctttcttccttccttcctccctccctcccttctttcctgttttgctttcttttcatatgtggctgtggaatagctattcagtacaggttacaaagggcaaggtcttgcatatggtacaaagtgggtaaaaaaaacctctttaaacaatctaatcaaatgttaccagccatttagataccatagttcatcactgcaagagtggaggagggggtcaccataatgactattctctcctcgtagaacaaaatggtcccacggttacagtcactatccctgaaaacctatttcaatgtctattaaattgctattaaaattatagctgtgtgagccaggcacggtggttcatgcctataaacccagcactttgggaggcagagatgcttgaggtcaggagtttgagaccagcctggccaacatggtgaaaccctgtctctactaaaaatacaaaaattagcctggtatggtggcaagtgcctgtagtctcagctacctctggaggctgagagaggagaatcacttgaatccaggaggcaaagttgaagtgagccaagatcacgccactgtactccagcctgggtgacagagcaagactctgtctcaaaaaaaaaaaaaaaaaaaaaaaaaattatacctctctgaaatgtttctattaagtgaaactgcaagataaaaaattacttttatataaaattgcaaaaggaacatactttgccccaaatgtagaaaagaaatacactaaaatgttgtaaggacgtggaattttatgaaattgtttttctatttctccagttttctgtaaagtggtatatcattatgtgagtcaaaatgccagaatccttgaaatttaaaaagaaagaataagcatggagagcccatggatgagtccttgagacacagcttaaatggaaaagcattatgtcttgcattcatccatgcacacgtgcatttctttaggtaatcattaattcatttcatcagtattttctcagcatccaccaagagccacctaattggtcaggctctgttaatacaaaagtgtgcaaacaggatttaggccctgaggatcccgcagattagtgagggggaaaaacatgtggatatataaacatggggatgaatttggtgtaacatttacccttttccgacgttagcagatttgattcggcttccaggcctcaggctttcacttgagcaatggcaacagtaatacctataagcattattgttatcatatagatggacagagtcaatgccagataatgtcagcccacttcccttattcctcactataattgttactaatacgcgtttaaatgatacatgtgccaggcactgtgccaaaggctttacatggattattttattaaaccctcacaatcacagtttagtaaggagactgctgacaattgcccacattttatagatgagaaaattagacctcagggaagctaagtaaacttgctcaaggtcatacagctagttaatgctagagtttaacttccattccaaatgactccaggacctgagctcccaactgaagggcgctttcctccctcccctagaaccctcccttctctagttattttcaacaggacatttatcactctaaattccactgactgaaactcaatgacctgcggcaaacattattctaaggaacaatatttgcacaattttcatatcttaatgcagcaacttgagcttccatagagatttaaatccctaatgaaatttccttgtcaaaattcttgctgaaggattgtttaatttgctgctcatgatatcttcagaatgactgtatgctcaggaaataagcttccactcaactccctccctccattttttctcttctgtctcctctcttctctccattccatcttccttccttcctccctctctctcgtctgtccagtgcatacttttgctgagtgaaatccctattagcagggggtgagaaaccgctgctcttttattctctcccaggcaatgcaaagttagtcagaaatgtgtatcttttacattaaattttaaaaataaaatcttaaatgacctatatttaggaaaatggtgcaaggatgtcactgtgagagccttactggcttgagtgtcttagcagtggttcagagctgggtcctcagactgtttcaaaaactcatcccctctgctctcttttaaatcccaagaacctatagctaactccattcaggaacatatttacctatgaggatcaatcttataaagtgtgtcagtgacagtttttgtaaatatatctaatgcaccaatctgtcagattaatcaaaccctcctatggattcaatgtaccacaagtcgcattcagatcatgaggctgaatagcaagcaggagttcagaaagaatgtagtgagtgactcagactttggtcagagtcaagaggaagtgaccttctgtggaggagccggcatcagctactgtggcattcttgaagggcatatttctgcctcctgcctcctatgctgccagcgcactgagggatagcagcagtaagcttcccggaagctgacttgtagactcctgccctggttttccttccttactacccattcccacccagggtagttaccatcctcagccttgaagcacagttagatggagctgaactatgtgtcagtcagaactgtgagccagcgaaggtttttctccatctcccctctcatgagcacatgccaggctgagttcccatcaagatcctgacataatcaccagccaatggaagcatgggggatgctgcagagaacagactcagaacagaatcaaagaatgcagtggggtagagaagatgcccattggaagcaagggcacgcctcctcacacacagctggagacagccgtttctaccccaccctgtgcctttctctccctgtcagaatccagtacttagcatattcctggctgtgatggcaggcttgagtctgcaggctcaagctctggcaagcagtgtatacagcttaaacacttggagtcgtctagcccctccgtggaaggtaggagcatcacttccatcatgtattcatacgtgctgacttcgattcgcactttgtttctttgcatcttagaaacaggctctgttctcaaagcacctggaaagatgctaggagcctggtctggatgtgattcagaggaagactggtgaaaaatatgatatggatttagacttcccatcagcccactgggtttgtgtgcctcagctttccaggaagaaccacttcacaagtccctaaagaaaagaaaaaaacaatcttcggtagagtgtgttctagcaccagagagggcatcaggtaggaaaataaatttataaacacagccccacttccaaatggcctgcagagacaaccaaatcatgcccaagcttggtctccttcctcatgttcccagggattgtcattcccagtgcctagaccatcaggctcagagccaagtggtgcccctttgccatatgtgtcacagtgaaggaaaaaaaaattgagaacagcctgggaatgccaatgtagggccaggagcctgggtaggcatttgctaagcagacacaaggagattttcctgaagattattaacagaaagttttcccccaaaagacccatgttctgtattcttgcctttctcaattgtatttaatatataggaacatgtgttctgtgtgtcaacaattaggtgaaagggtgaaacaaaaggtgctctgaattggaagtcaaagggttttgttctaattctgtgaccacctgatctttgtggtgtggcctttggcaaagcacagtttatttggaccttggtttctttatctgtagaacaattccatgggcatccagcttaaagaaagtgatggccctcagcagagcaggctgtcttgcaagccattcagaaggggagttcagtgcaccaccaaactagtggatttcttcactcattcattcatttccccagataattaagcatatgtaacatataccatgctttggatccaaataataataatcacagatcctattgtcttaatccatttgggatgctatgaaaaaataccattaactgggtggcttataaacaacagaaatttatttctcactattgtgaatgctaggaagtcaagatcaaggtgctggcaggttcagtgtctgctgtgggcaattttctgatagagggtgcattctctgtttccttacattggaaggcatgacacaactctctgcgcctcttttggaagggcttgaatcctattcatgaggatttcttcttcccgatctatcacctcccaaaggcactgcctcttactagcaccacattaaggattaggtttccacataagaatttcggtgggacacaaactttcagaccatagcatctaccatcagtaaactcagtgtagttaactgtgtttattgacattgaattacagactacaaaggacgtaatgtctgcaagatattgaaatgttttcttccttcactcattcaaaatcttattaatagtttgacattggacaagttgcataacattaataaaccctggctttcttctttataaattaagatattctaatctgtaacatatatagctgttgctaggatgaaataaaatactccattcagagcatgtcatgcttgggacattgtgagagctcaataaatattatctattatcatcattattatttttgttgtttcaactgtcaccttgattagtacacagtgtacaaggcactgagacaggtgctactaaggattaaaaagcatgcagcctattacctggcctcgaatatctccagttgtactgaggaagtaaaaatgcatgaagaagtacaaatgaggacacacgaaagacatgattgctaaggaaatataaaaatggaggggcaataaaagttcacataaagtggaaggagagatctggtgttaggaaaggatttctctaggagagaagattgcagtgagctattcacacaggatgtgtatctgtgaactgttgtacaagctgcacactgcccgacttcactggtatcatttatgctagagtgtgaagggccttctgtggagggttgcaacttggtcctgggaaggacatttccatgaataaattagatagaggaaaaacagattcttgaggacacaaagcagaaactaattatcactttcccctggtctattaatccatacagatgaaagaatgtatcttccagactggcatctgctgggaatacttaagtctgctaagctactctgccttccaggagccataaaaacattgttagcagaatggatttatatgtaaaatctgtcactcttattaccgtttttctggcttgccatgagaaggagaaacagagaattatctgattttgaccatgtcaccatgaatctcacaaaacccattaattctgtcaggttgtatatttttatatatttgattgctaatatcttcaagtctttccttttaaattatatagacaccaatcttttaccaatcatgtatgcaaacacatgatttctagatactaggaaaataattttatttacaagaaaggaaaaatttcctatgggtacctgattcagagataaccactgataatcaattcgtgcatactactccacatattttctactttttctgtggcatacatatgtattcatttttatttgtttgtttggtttttagaggcagggtcttgctctgtcacccaggctggagtgcaatggcatgatcttggctcactgcagcctcaactttctgggctcaagtgagcttgcctcagcctcccaagtagctgggactacaaatgcctgccaccacactcaactactttttaaaaaaatgtttataaggacagggtcttgctatgttgcccaggctggtcttgaactcctggcctcaggagatcctcccatctcagtctcccaaagtgctgggattacaggcttgagccactgtgccagacttgtatttggttttaaccattatgttgaaagcaggcctcacagggccagagggaagcccacctgcccttgcctctctcagctagagtgtttgggtctgtctgcccagcttgctaactacagcttccctgttggccccggctcactgggggccactctacccactctacccgggaagaggattgttcttctgtcctcccagggggcctgttcagcaggtctgaagacagttcccaactggttctcggttctcctgtgtggtccacagctattccacaggacatgctcactatattgtatcattgtgccctgggagagctgggcattcaggagcctctgtcaccagactgtcaggatcaaagatgacacttcctctctgtcatctctcctctgtcctttttatagtttcaaagtcagagagggagatcaagtgttatggaatggttctagattatctaattatttcctttataaattctgcgtgtggtgttttgtctcacacttcattatctattattcattatattgacatcttaatcaaatctgaggtaccagaaattaaatattcataccttattacacaatatactcatttgccttacaaaattaggattggctggatgctcacgcttgtaatctcagcactttgggaagccatggtgtaagtactccttgagcccaggagttgaatatcagcctgggcagcataggaagaccttgtttctagacaaaaaaataaaataaaatagccaggcatggcggtatgcacctgtagtcccagctacttgggaggctgaagctggaggatcgcttgagctcaggagctcgaggctgctgtgagttgtgattgcgccactgcactccagcctgggtgatgtagtgagaccttttctcaattaataacaacaacaaaaaaaggaacaccatcaggattatactacctgtattttgtaacttctacttcccactcaatatattgtgagctttttcccacagaattttcttaattttatattcttttaaactattcttttatattcttttataaatattccttataatattataagaatttaacgtaaattattttaccagtcatctatgaagggctgtttagtgggtttccaattttgcctgcttacagtgattaacaaccattatgcgtaagtctctgtaccttgatgtccaaatgatttcttgaggataaattcctagattttgatatattttgataacttttcctccagaaagattatatctgtttacatttccgtgagtgaaaagtaaaattgattttacttttttctttaccaacactggatagtattaattgctacttgtacagggaaaattatataccactaatattttatattgtaccttgattgccagcaatattgaatccttttttcacttgtttattggtcagtttcatttgtacctttatgaatttttaattatttttctttgctcactttgaaatactataatatttcaatcttatttaaaagagtttgctattttgaggataacaaactattcactatcatataatttttccagattgctctttgatttattatttatgatattttttgaagcatacaaaagttttgccttttatggagtcaaatctattaggtattttttaaaaagtagttcatatgggctaatgctatccttagcctaagaatgaaatgaattaacagtaattaagctattcaattttattatatttctatctgaaatttatgttagtgtgtagttttatattaagagtaatatgtttaaaaacacatttaatttttccaacagaatttattcaatagtctgacatttcttgatgatttataaatataaattaattatataatatataattacacatatttggtgttgtctgtggactttctactctgcagataggggtaacaccatgagagtatttagttttaagagaattgtagtttacatttggtaagattatttcctcaatttaaaaatatataattggttaaatatgattcaaccatatattgatttgaacttgattacatatgcattttagaataatatgcttgaaaaacaaccaatatatgatattaaatacaatataggattcaaaacaacatgtatgttatgactagggtgaccatataacttatcatctaaactaggatatttggaaagtgaaaagcagagctatgaataattacactggaataaaaaatatgaggcaaaactatacactcacccaaatttgtaacataaacatgtatatacttaactacataggcttaaaaaaaacttgaaggcactgtattgcaaaatatggtaggattgcacaattttttcaatatcttttgtgtatctcccaattttctgcaacacatttatattgtatatattattatattatttatttttaattattattttaaatttaataaatattaaaagaatgacaataatgacaaatgcttttttgatgattactgccagggactgttctaagttttaacaaataatcctcacacagtgttgtaaggtagattaaatcaattcccactttaatgtgtggaaactgagaaaaataaagtaaataaataaatacataaataaataataaaataaataaaataatttgcccaaggatacacacttagtcaatggaagcactgaaattttaaacccattgggtatacagtctaaaaaaatagaacatgaagaagcagttacaaacattgagagaatcgctttcccatagagttataattatgattcctcacattgcttctcttcctttgagcatcattatttttgatgcaacttttcatactgttctgctgtattaggatttgtggtgtcttctaacaaattgcaatatgggttcctgtgtaaaacttgagggcttggagagaggagggttttatttagttttgtcttgacagttgcaacttcagttgcagtcggagtagggaaggctttgctgcaagccaccttgctgagacatgccctgaggtggtgctctgtgttcatttcctaagcagaaatttgctgttttgagacctccactctgctcatagcatgactccccagagagaaaatcctagcagtgtctctggtctctgcttatagggcacctacagctgaggttggtgtaagacaggtgtctcgtggccatggctacctgctcaagaaggtgtaaagcccaggacaaatgcctaagtttcaccactcgccctaccctctgctacctttgccctcatcctctccatgtgagcaatcttagtagggttcttatcactcctataaggtgtttggagcctgattctgctcaactctccatacagtttaattttatatacaagtttttgtagtgtatttctacctttactgtatttggcctgtcacttatatgtgaggatggtgcctccttctgagatttatccattgatgtagctccccctccacatcccatattcataattttttttcatggaaagcatatgtggggacagtcttttgtgagtattccaatggcctttttaactagaagtttccaaagggttcacttttgagtgagtagaaggaagcactgaaaaaaaaaaaaaaagatggaaaatggggccaagactacccgaagattaaaagcaaagaaacaataaccacaaaacccaattagccctcaatcaaaagggtccagcacattggagattactttcattctgccatccatagctttctgtgcttctttctcatagtccactttggataaatttcaatcacatctaataacatcacatgtgtcactagacagacacaaccactttctgcaaaattcagaggaaaaccataatcattttcaactctgttaactagactttcctaaatgaatctatttatttacattctatgcccaagagctacattttgaagataaatagcagaattacctatttcttttgatggtgttttacatgacactgatgttaggagacaaccaacacagtgctgtaccaagtaacacgcccatgatcctccttttcctgagacagctattttcatagaatatgatagagcaatttcaccaatgtgtgactgacatgaaatggaatggtttgagctattatcatctttatttctaatttggtactaccagcgtttcagtttttaatatagttttaaaaaattggacacatgaattataaataatatctcataatgtggattaagaacacaaacagagagaagcagaaaaactgactacattgttgacagtagtcagagacacagggttctgaattttctcttaagagaaacatctccttaggtccccttaggcccatatttcaagttccaacagagtttttcatggaatgaggacttaactgagtgccaaatttcatgctaggcctctgtctacacatccttatttattatttctgagttatagtaattttatggttgaggcaacagacattcagataaattaattcacctacaaaaataatcaatttgtaagaatttgaaatcaaatctgctgagtccacattttagccatcaaagggccttttgatatgggccaaccaaattttcttgcaataggaaactttttaatatttattttactttattttttcatgaggggtcaagagcaaaacattctccatcatttattgaaattaatatcttcattaagtgtcatgacaagaggtataattaaaaatgtaacttgaaatatgtcaaaagatggatgcataattagtacagtttggggtaaaatcattgcattaagcaaagcagtccaccgtatataacctaattcttgtacatgatacgcacttgacaaaactgtgaacaattaaaatgaatttttgatgatttgtttgatatgtggataaattttttagaaccagcactggatcttctgaattcctggctcccctaactatttttagtctctccttatgaataagctgtcagtggtcaattatactggttggtgtctccactgtctccattttcttgggaatcttgaaaagtcaatcccttagggaagttttgtttgagaattaaggtggaattgatctggcagataaacattagattcccactgtgctttaaaccatgagaaggttatcaaattttcagtttttcctgatttcttgtcttcacagaaaagctctgtgattatacatgcaggacatttttaaatattgggcataacccactttagttgtccaggaacacattccagatccaataggagtgctttgtggataatctgtaagtggtgttccttaattaagagtgagcaacagggaatttgtaaatcaaaaacacatccctatagtgtaagccaattcagctacaagtaacatttattaacaacctattctagttcatacaagaaaccttgccaggtacatgcacaaaagttctgtcatttaactcttacaagataaagtagctattagtatcctcatttttgaactatgtaaataagattagaaaaggaaaccctagatgaagaacatcatcaagacttattgtaagatataagaagaactaaattgagagataatagcatgacctaccatagaatacttttgtagaatggaattgttccttaaatatctattgctatagttccaaatacaatcctcagactatgtcttaaatgtttttcttagcttttgtttgtttgtttgtttcttgtgtatctaattatggaacttaatcaccagcttgttgaggacaaatatgctggatttggttaccactacatctcaagtgcctttcatgcttccattacatcaggcactcaggtaattttgattgaatgagtgaaagagagacttgtttaaggtaacatgttttactagctcccattttaaatgtggttttagtacacctactttaaaatttatttagtattcacccaatgtctatgactttgctaagaattatggataattaatacagtaacagtatattttattttattttaaaaacctattttaattgaatttaatttttaggatagtaatacattcacatggttcagtatcaaacagcataaagaggtttacaataaaatgtattctacccttatcccccatttacccagttcttctgtgataggcaatcaatgccgttaattccttgtaaatctttgtaaagctactgtataaacgtataagtaaaatgaacaaaaaatccccttatctctttttatataaataacagctcgtaatacacactgttccacatctcgctttttcatctagcaatgatctagctttttcatctaaaatgatcttcaagatcattttatttcagttcatacagaacattctaattctttttataattgtatacaattccattcattgcatatagcataatatgactgctatggtctgaatgttaatgttcccaccaaaaattcatatgttgaaacataattaccaatgtgatgacattaggaggtagattagatcatcagagtgaagtcctcatgaatgggattaatgaccttaaagaggctcaagagctgccttgcttcttccaccatgtgaggacacagcaagaagacgcagtataagtacaagggccttttacctgccagcactttgatcttggacttcccagcctttaggatcataataaatagatttctgttatttataaacgacccagtttatggtattttgttacagcaatccaaagggactcagaaaacgatgtaacaacccatctgtgaatttgcatttggtttatttgctgtttaaattatgctactttaagtagtatatagaataaatttctaaagtggaaaatgtgggtgaaatatatgtacctttatagacctttgggttctcctcattgtcatactactagaatggtaccaatttaaaatcttaaatcctctgttttccaaagcctctttgacatgacggtttgttttatgaaactatatttgtctttgtttaatcttagaagtgaagaatactaactcattcatttttaaatttaattctttttatgatgagtgacatgaaaacatctttttatattttaaaagttttttattttttctttcctgtgaagtctctttaatattcctccccagtgtgtaattcagttattggtgattttcttattgatttgtaggagctatttttatttaagggaaatgaggcctttgattatgacatgagattgaagtagtttttttcttttgatctttgcattttgtctttgattatgatagttcaggcacaacaggaaacttctttttcctttctttttttccatgcattcctcttttctccctccctccttctttctttcctctcttcatttctttgtttttccttccttctttctttctttcttttattcttttattagaataattcattttttaccattgtggctattgggttttgtttactacctttaaaaagttccaccgggagtggtggctcacacctgcaatcccagcactttgggaggctgaggtgggcagatcatgaggttaggagattgagaccatcctggccaacatggtgaaaccccgtctttactaaatatacaaaaattacctgggcatggtggcacatgcatgtaatcctagttctttgggaggttgaggcaggagaattgcttgagccagggagtcagaggttgcagtgagccaagatcatgcctctgcactccagcctggcaaaagagtgagactccatctcaaaaaaaaaaaaaaaagttccttctcactccaaatttattcactaatatttctatctaaaaattttaggaatgtaattatttcagtattttttccttaaatcttgaaatgaatccagacttcttttttcctagatgattacacagattcccaagatcatttaattagtaatattattagcagcatatttgtcagtattaaatcgtatttatttattaataatgtcatattcttataaatgaatgaaaagatacataatgaaatatttcacatttatttggttctatttctattctgttctatggatccatatatttgtacatcattataatattcttaattattagggttttattaaatatattaaaatatataaaaggagagcatacccttcgttagctgtcttccatatcccccaaaatttgtatttgggttttatgaactcatttctgtctcaccagtgattactaatatatacttaggagttgattgttacacttaaaggtagctatgatgaaacatgagttaatgaagcagaagaagccaggctacataatgagagaagattaaaataacagagaaaggggggaaaagaaaaaaaaaaaaagcagataaagattgctttgcttctggaaatggcaacccaactaactctcttatttttttcatagccaggaaagaaaacttactatcatttccaaatgacaagcctcaacccaatttaattagctttaccttgagatccagagaccaatcctgttctatgtagctttatttgactcctaacatcccttgatctttctattctgtggggtgtttcattatctaaagcaaatatatactacttaaacataaaaaattgtaacattatgaggggtgactcattactggtgtgtaatatcatggtaccagacattactaatatgtaaggagcatgagcagaaagacaccagcctgtgtatagccatagactactatgcttttaattgttttgagattgagtgtctcaagatctagataaatcagcaagatgaaagatgctgaacactgacatcttctttgtgccttgtgaaaagaaacaaatgacatctctgagctgcttagaaaagaattatacctgggatagtggtcaagagtggggagatatatctcaggagagtctcaggtagtttgagtttttttcctgttcccttcataacaaacatgattcacagcaaccattgtagtattatcagtaaacaaggctcctgtttacatggtgacctgaaatagaccctgtagccagacatatccatccttccttgttccaaacacacaaattttactatactgcctttgtagtcactaccattttccttcaatggagttactttcttcctgcagtaatctcatagtaatttgtacactcttctcaaacaatcaacctcaaaaggatctaccatttgttggacacctaatacttcttttgaacacttgatctcattttatctcagcctctctgcccaaaaaatcatctagattgatattactgctgtcatttttcaggctagatgctgaatcctatttctagctgaagcttaggccatagcttcacttcaggctgcagcagaataagggaagggaagaatctgagtcccctggcttccactggggtggggagtttcctcagagatagggagaattcttccaaccaaaggaaatttgggaaatattaggaaacaggattatctgctgagaaggacaaaaccattccactgtaaatcaattgattaatccacatacaaacaacaggttttcttgcacaggaaaaactctgacacatattttactttacttttgtccttaaggacctgatgataggcctaggtacaccatctacttcacatttttctaatcttcctgtttaatgtcgcaatcaaacaagaaaagaagcagctttacttgttccttgtaaaccatgttgtccctcagtgatgccagcatcttccactggctcatattgaccaatatttcatacaagtgttcttgcaccttgcagttgcacctagcatcttcctgatttacagtctcagaactcgctctgtagacaccttttttttttctaaactgaaaacgtaccgtttgttttccatcttcctgtaactcctctaagaaagcagatggtggatcagatctcaggccaaagttctctccagatatgggatataatccaagcaacctggtacctgggaactcatttttactcctgtgagctcttatccatcattctggacttcagcagctgctcttcagcgtctgtttattcttttctactgaactcccttctctttgacagaaagcgtggctacagaaaacattctgactaattctgtttggggtcagtcatgaataactttattccaacagcttccaatggcaggcaaatcctttcccggttttacatactaatgtaaaataattctcaaggataaatctatgcttaacatattcaaattaaactttccagtcagataatatattctccttaatgtgcccagtgtatgtagttcgtagtatacactaactgcaatctactgatttatttgattgtgcacctaaaatatacaagtagtacatttcacaagtaagtacaaattcttcttttcagagtggagaaagaaatatatggatcctgtcctcatggaacttatacagatgataactaacactagttactacttaatttaaaagtggtacaaagtaccaggaagtaaatgtccagaatgcaataatgatatgtaacagtgaaacaaactggaccttgttggagagaaggttttcaggaatatattcattcagtcattcattcaacacttgctgtgaaccaagcactactgtttttttttttttcttatttggaaaaaagctgcatatttcattgactcttctgaacaaaggtcattaatacaaaagcacttgtaagttgctttacctggggaaagtattttggtgatttttatctaggtgaagttttctgggctcaaaaatcttttcctaacaggttgattttaataacagtccaaactattccaaaacaaaacaaaactgttttcctctcttcctaaacagaaacaatggcatccggagctgaaaatagcgttaattacatgaaaagtttgtgatgcacaggatttgctctggagtatgaaaagtgtgtcttagacttatgtttatactcacataaaatgagcaaaaaacgatagtcctcttcaggaagagattatctgatgaaaatctgcaaagatacttcaatctttctatgtactggagagtttatgaagccccaaccactgttctaagtagtgagacactttaccactttttgtacacgtgttgggttggagagtgacagattgaaaataaatatggaaattactgaataaacttatcagacagtgataaggtaattcagtagagaatgattagattgctactttattctgagtttcactagagaagaaatatttaaactgagatctgaataacaagaaagaaaattcttcggggaaggagcattccatagggagaaaacatccatggaaaagaccttaagcctgggataaacctgatatgctcaaaacaaaataaaacatacacacaaaatgtcagaatgaatgatgcaatatattggatgaagaggaatgtgatcatatcattgtcatcctaatgacgacccctttgagagtgaaaggagatgatgctctgtataataataaccaggccacaagcaggcatgcagccccttctggttgaataattgagaaacgaaagtctgctagaaggagaggctcaataaatatttgttgaaggaaggaataattgctctcactctaatggaatttttttttaaatttcttaacaaattgatttaattaaatctagttctagatgtatttatattttaaaatattttaatttgggcatttttggcttgatttggtcagtgtctttgtttttagagctccagatggctccaaaatatttttgttctcagcctttctctatgttaatactatcagtgaggccaacttagacaggtgtcccatgtgaattgcaattatttcacctcaaatggtttgtcttaccctagtcaaaacaaagcagctttgatttactacagttgaggtagaagagagattgctgaaggttacaagcctgattctgcttttattgtgtcatttgaggttgacctttatgctccagtaacctccctgaatctgtgtttttccaagtgtctgtaatgctcagtgttgggcatagccctggatgacactttcagatgaggaagtctgctgaacatctggctaaaaagcaagttttggagagcattttaggacttaaaatataaagtctaacagttttctgtattataaatgaccagatcagcatctatagatgtatttttatgagtaataaagtataaggggaaaggcttgcagagagaaaaagcaaggaagagaagtatgtcaatgaatacaaattctctcatttgataagaaaatgtaaaattatgaataaatgtatgacatctcattgcaagatatgataagactcaatttcccctgtttattgtcaccgaatatctaggaaacaaaaattttcaggacttcagtattttagcaggaagaaatctagtgactatagattgcctacccctcaccatctcaccagtgaaggtcttggtcagtagtctgtagctctccattttctgccccctaaatgtgtcttgcagtgagtggtcagtggtcaaatgaatggaacagtagaggcacttctatatcagcatgaaaaaccagtgaaatgctgtcttgccaatactgtgtatacagagagacatttataaaataataagcaggtaaaacttgtcttggcaaaaggctggctcattacattcagtgaatgttaaaaaaaaaaaaaagtcctctgtggtgataagtaaaatagaccatcaccacccaaatcaagccacattaacatcttgaactgctatgctttggatatggtttgtccctgccaaaactcatgttgaaatttgatccccaatggggcagtgttgggaggtaggacctagtgagagatgtttgggccatgggggcagatctgtcatgaagagattaatgtcctcttacaagtaagttctccatctaaagggaatgggttagtctggtgttaaaaggagcctggctttcttggtctctctctctctctctcttacttcctctcttactacgcaatctgtttgcatatgcctactcccattctactttctgccttaaattgaagcagcatgaggccctcaccagatgcagctgatacatgctgagagtaaattaaaccttccagtcaccagaattgttagccaaataaacctcttttgtttgtagaaaatcttgaactttccagtcaccagaattgttagccaaataaacctcttttctttgtagattgcccagactcaaaaattcttttataacaactctaaacagagacattaaccaacagcaggagttaatgaaaccaaaagtatgtcatgaggacagaaaatgtcaaatattttaccaaaatctttgggaagtctttcaaatgtcaaaccaatcacatcactgagatcctgcacatagagctcctggttacctcttgacacaggtagcaccctctaaagtgagagcaccagtggtgatatccttagccaaagtgatgagaagttgtatgttccagcaaaagtagcataacacaaaaacatacaagtgtttgagacaaagaagactcttaaccagggttcctagctttcattgagaaaatcctctcaatacatccttatcactcaaaaaattgaaatccattataataataatcatactaatctattgatgaaataataagaaacagcggaaggaaggatggtaggtaacagtcggcacaagacacacaaagaggaaactctatgggttctgcatgcgtgagttgctgaaaatgagctttaaggttaaagccaggagtttggaattaatgtgtagcatgtgaaatataaaaaactccattcaatgccctcaattttatcagaggattagggtaacctcctggatacttgcagaaaaaagaaagccagcaataagcatttggctgtggcttggaggtttaatttactctcagcatgtagcatgggaacctttttgcctgagttgagaaaatagcctataaactagcaccacaaccccagaaaaacacagggccccagtagagacaaacagaagaacttccaacagagatgcccacagccaaaagcacatctggtctctaaagaataactcatgatgctagtgatctcacaggaaaaattacaacaaagataagaaaaaagcatataagaaaatcttcataagagaattgtcagcagatgtagaaatcaatccagaatgcagccaaagagaaaacatgaacaatgtgtgaattaaaagcagataaatatagcataccaaataccaaggaagagaaaaacattactctgataattaatagcgaagcataatcatcaaaaaggcaaagtaccactatcgtctctgtcatctaacttcatactgaagctttaagtaagcctaataacagaataagaaaaaagagaaagaacattacaaaatgaaataaaactatattattctgcattacagaggctatggttttatctacttagaaaataaaaaaataaataaatagagaatagctaccaaaactaaagaactaataaaatcagcatacagaagacagtcttacatacagacaactataactaattagaaaatataattttaacagattttttaataagaaatctattacattttctgattttattagtgtatgtacatggcaatggcatacataattaaatgtatattacaaatgtaaactaagtatatattgtaaaaaaattaaaaatatcatattcccaacagcttcaaatgttatataacgtagactctcaggagactaggtactcttagaactagaaaaaaaaattcaataaatagcactgaggaaattgggtgcccacatgaaaataattaaatgtatttcatatttttaaaaatctacagatgacttgagctaattataaaaaaaactctaaaactttgagaagaaaatatagaatattttatgatatatagcaaaaatgtaatattttcaaggaagaaagtaaaacatatcgaaaccaaagttaaagcaaactgacttctattttatcaaggcttatctaaaaacacaatagcaattcttcagaaatatctgtggaacccttctaaattaattataacctcactataataaaaaagtaatatcttcaagaaaataaggcatttttagagaccatttgtagccatagtgcaataaaacaagaagcaaaaacaaagtaacagaaaataacccaaatactttcctattccaacaaacaaaaaccaaaactcttctaaagaatccttagcttaaattggaatcaaagctgcaataacaaacattttgttagaaaataacagtagacaatcatcatttaaattctgttgataaagtgctcagcataaaaacctgagactgaattgctacttttcagtaaaaacaacataaaccagaagtcagaaataattttaagagaaggaaaatcaaaagtcaatgcatttgaaaaaataaaattaataaaatatataaaattaagaaataaatcagtttggcttgtaataattccagtaatggaatgaaataattatttagaaagcaaggaaaaacataaatggaatgcttctcagtattttcaaaataaaaaaattaagttaaaattataaaacatatatatgtgtatgcacaaatataaattgtatttttttctttttcctttttttcttctttcttcctttcttccttccgttctttcttctttctttctttctctttctttctttctttctttctttctttctttctttctttctttctttcttttctttctttcttctttcttttcctttctctctttctttctttcttttctttctttcttctttcttttcctttctctctttctttctttctttttttttgataggacctcactctgttgcctaggtgggagtgcagtggtgcaatcacagctcactgcagcctccgcctcgccagctaggtttttggattgtttgcagatatgggttttcaccatgttgcccaggctggtctcaaacttctgggctcaagcaatccacccaccttagactcccaaagtgctgggattacaggcatgagccaccacacccagccacaaatagaaattttccaatttccattatgaatgagaaaaatgaataaaacaagaattataaaattaaatttttcaaacgctaattaaaaatacttgaaaagtttaccagccccaatgtttatataattccatgccatttaaattactttaaagcataggccatacaatgcaaactcaattcattgaataagacacacaaatgatacatgaaatctgacagtgatagcaatacattgaatatataaatcaatttgaattatgaatagtaatgcagaaatgtggaaatcagttcttccgtatacatatatacatttgcatgcatgcctgtgtgtctgtgtatacttgattctaaggaatgaatgaaaataatagttaacaaaatagcctagactttattcaatgtattcaactcttgtcttcaatatattccactgagaatgttgtagttataacactatatcctgtaccaagctttccatgtcaactagctttttgtttagtcacgcatagtatgctgtggtttgaatgtgtgccccaaaacccatgttgaagttcagttgccatggtgatgatattaagagtcagggccgttaagaggtgattagtcctgagggctctgccctcatgaatggattaatgctgttattgtccatctcctctttaaaatgatgcatccaaaagtctctgaaatgcatttgatttgtataaagagttattgccaaactgcccttttcagtgacaacatttatacactaacaaacatggttttttgtgacacctgattcttgcccagtgtttatggggtacagtgatttcatgaaaagcacacctagctgaaatttggggaacaattgtttcatgtagaaagaatgaatcttagattgtattaaaattcaaatatgccatgacaaacagcgaccttttccagaggttttgtaataatcactcagcatgaggatgtcaattaataaatatgtgaaagcacattgataggccacaggaaaaattcatgtaaccatcctgaaatgcagaaagtattaaagaaatatccatttatccttaaagactcttagtaaaatatatttgaaaagtactttcctcatataatgaaagataattatctaaaataaattgacaaatatcaaaatagcaatagaattatagaggaattcctcttaaatttaaaacaaaacttagacttgtagcataaaacaaagaaaaataaaatttaaaaaactattttggattgctgaccaaattaataacaaataatcaaaataattaatatacgagtaaagaacattatcaatatgtgcagttttttgtacttggaaaccccaagataaatgagaaacaactttgaacacttcccatgttcaaaaaaaaaagtgactgactttgaaatcttcatacaaaaatcatttaatttataatgtcttatctgtccagtatggtggccattggtcatatgtggctgttgatcatacagaatgtgtctagtccaaattaagatgctctgcaagtaaaatatgtgtattagaattcaaagacttcatgtagaaaaaaagaaatgtaaaataactcattttactttttaatttttattagatgttgacatgataatatttggacatattgaatgaagtaaaatatgttaaaattaatccatctgtttctttttactcttttaatgtggatagtggaaaatttttaattgcatacatggcttgcatatgactcacattatatttcctttttctttttttttgagacagagtctcagtctgtcaccctgaagtacagtggagtggtcttggctcactgcaacttctgcctcccaggttcaagagatttttctgcttcatcctcctgagcacctgggaatacaggcatgcgccaccacacccaactactttttgtacttttagtggagatggggttttgccatgttgaccaggctggtctcgaactcgtagcctcaagtgatctgcccgcttcagctttctagagtgcttggattacaggtgtgagccaccagacccggcttcacattatatttctattaaaccacattgccctatgcaaatttttttttttttttttttttgagacttagtctcgctctgtcgcctaagtgcagtggtgcaatctcggctcactgcaacctgtgttcaagcgattctcctgcctcagcctcccgagtagctgagattacaggcacccaccgccacgcctggctaatttttgtatttttggtaaagacagggcttcaccatgttggccaggcaagtctcgaactcctgacctcaggtgatccgcccacctcagcctcccaaagtgctcccaaagtactcccaaagtacaggcatgagccaccacacccagccagcaaataaaaaatttttaaaaaagataatatgatagggaaattatttctttttgtaaaagcagtgcaaagtcagtaaactctaggtataaaaatataagatagtataagatgctgcagcaactgtatgattaaaactatgaagctatgttttgggctgtgtgtgtgtgagacagagagagcaacagaaagagaggaaagaaaagagagagagagaaagacagagaagaaggttcctgccatgctccttatttgaaaatcatgtcatatgacaaagtgtagtttaaattatactgcctagaactctttattcagtatgatccaatatcaaattatcaatattataaagaaggaaatgcttgctaaagtgattggtaaattcaatacagttttcattaaaaatatattttggaaagggtttgaactattttaaaattcttcagaataaacacctgagaaaaccagaacaaaaaccagtacctatgaacaatagaaaataaagaagacattttaactaagtaagaaaataatgcattatttaatattgggctagctctctaaccatatggaaatgaaagtataaaattcaattatttttcttacaattcacacaaaataaattttagaggattaaagttttacatatgatacaatgacaaagtaatataagtaaaccaaacaatcaaaaatataatcttattggatggaaagcatacttacacatgatacaaatgttagaattattatagaaatgattataaataaacagaaagtgaaatgggataagttgttcaacctcactgtagcgaagaaaatgcaaactaaaggatgctaattactcagaaattgaaatttatcaccattcattaaattaacactattttccaggagaagtgacaaataccaaaggtaggaatataggaatgaagatgttataaagaaaaaagccataacaaacaatcaattcagtaattcattttacttttctcttttcctcatgcaagttccctttgatggaaaattattgttggaggaatgtggtatcctgatccaaaatgataataatgtggtatgcatataactatttactttcttgtaatgtgtagcaaggtttgtagactgaattttagtttgtggaatgaataaatatcatctatatgaacatgattttttgaattattttgaaatgtcagctcttaactgacatagcaagtcatctctaagtaataaaatttaatatcagatttgatttccactcagaatttgtgtgtttaaggttttcattgcaaaaaagataatatagctttgcagaagttagacagttatttcctattcaattgctttgatgtgcctatttctttgaacaaaatctctttttaaatgctcttttgatatgtgagctcatggttgctctgaaattaatcccaaatgcaaaatgctcgtgaagaatttagagtttgctaaaagtagttattttgatacatttgttgatattttcttgatagggaatgaaccataatttactttaattatttttacgtgtgaatgtacgaaagtaaacagcagcaaccaccactttctaaagcagaaagtattttgtggccaggttttctcttggctcttaggagggccttctcgtctttattgtgatgctgacatgtgatacagacaatgaagactgaagtggtcagcctgaacaataacaaaaatgaccacaactagtcacagacttagaaaacacttctttcacacttttgtctataaagatctgcttatattgaatggaaatgaaccctaaaaatagtctagtttaaggataaggatcacattttataatttgcttgaggttggttgggctagtagctaatttaaatataggtctaaatgttctagtataacattgtttctcttatcctttctgtggtcttgctagtggggatggagtgtgggtagagttatcttgtagttcagctattagaaaactgtttcttcttcatcccagaataaatcttctacatcaagtagtacgctgattaccttctgtaattaaagacaaaaatgtatacatgtatttcctatttcatcagtcagtttgactgatatctgactccttacttattaaatgaagatattagcatccttagtcttttttttaatctctcttccctaggcccttctgtcttcccatttctgttgtttgttaagaacacttaaatatagcgtcaccataaatatatttttcttaccttactcataggtatattttgaaatctagtactctacgaagactaatcaccttaatatgtggatatattgtggatatatatatatatgatatatataaatccttatatatatatataaggatgatatatataaatccttaatatgtggatacaatgatccattgtaaaatcaagtatgaaattttgattatatttcctttcagtatagcttcttggattgttggtccagctagcaactctattaattctctccctccaatactcacagtgaccagttatttcaccttgtctcctggagcacccatctatcacacaaacagataccttctcaatctgctgcctgcatgtcttcttgggatttatctgcactgtttgcctgggttgcgtacttcatttttggattttcttgctttcctgtttttaattttgtttttcctcctttggctaaataaggaccatatattccctgagtatttctagagtgtctgaaaaatgtctttattctatgctcacactaccaggatcttttagcatttttcttcacgggttcttttaatctagagattcctgttcatctgctctattaaatacactttattatggtctggatagttttcatctctacattttattttttcttttctgttttctcattcttaaatttctcttggttggctattggatctcctggattggttttcttaatcttattatcttaccttttcccagtctttgtccatttcttttatttattgagaaatgttcatatattcctagtcttttatttattctttttatcttaactataacactgtaaattccaagatatcagatgtctcctttcctcaggaatttccattacattttacaggtgaaatactttttttgaatgtctctaaggatattactgttggtaatataatattttcttattttctatgaattatctctgttctctctctctctctctctctctctcatcctctgttcatgtttaagagtaaagtatgaggagttctttgagaactctgcgtatgtccatagtgctcctcaccttggagcaggccttcattttaagatgcttgacttggagctggtgtcattttggaggcccccagataccagaatgtcactggagtcacactctctcaacagatggccttccaggctcctttctaaaggcggatgcctgaccactgactgttgcaagtcaagagtaggagaaatgtgtctaggagtacgtattgtatctgtccccctccccacttcatgtgttcagttccatgtctttctttcactttcacgtgtactaggcacgtttttagtctcagacttctctgtggttttactaggagagctgtctcacttctcagttgtgtcccacactgcatttttctccatcccagttcaatagttaccactcttccatggacatgtggccttcaagagtttatagaaactttttataccctgatggttctttatcaacctcttgtttgtcgtagtgacctatttttttatacttacatttatttggttcccatgaaggaaagaaaatagatgcatgtggttaatccctcatccttaggctagaagttaccccaagaaattttaatttccatgttaataacccacctagcaccaagtaattgtagagattttcatctcttcaagaaaacagataaaatatttgtctcatcttctggctttctgtatgcagtatataaaacatttttctttcactgatagcaattcatgttattaactattttaatgatataaaatatctcactttattttaagtaatttaattttatctctttcatctgattaagatagattttctagcttcttaagttgtttaatgcaaagacaaggcttttgacagaaaatccatgtcacagtctaggaaatagcttttttgtgtgtgtacctacatttctgacgttcaagtttgttcccaaatttaaactcaaccctcaagcaatttgatttttgaacaaaaagaaatgttatatgtgttctctttctatgtatttaagattctatacgctttaagaagcaattactaataaaactgagattctaacagtcaaaattgtcagtagttttatcatcatctttgtcagtctttgacgactacagatgaaaggctccaaattgtactagattatttgtaacattttaacccataaagaaaatggaaataaatagtttgtgaaatatggttatcattaccaacctatatgtttttgccattagaagtcattttaacttttagtacataacaactaggatattacataattctcatgtgacttctattctttttaccaccctagaatacctgaagcaccagttcaaaggctgagttgtacttacatattctaaatgtttccatagttcctgcaaatattgactgatatcttgagaaaatataccttcaagagtttaatcatttaccttaaattgaaaatttgtattttaatggattctgggctgaattatgactgtcgattttaaataactttaattacttgaatttaggaaaattaataacataatttcaatattaaaaaaatattttgagatatatttctcaagtataatttaagagtaaagcagttcttatcactgtgatatgtgtttaggatatgtgtgattcagattgctgattttaacaaataactattctgcacagtgaagtagaaagcaatagactaggattagaagactaaattttaaacctcagctgtgaaaaatcagaagtctaaaaattactagcacaagtcaaaaaatcaagcctttcttttctcctaagtgtggatttatgtaattcttcctacatatctttttttctctatctaaattgtataaatataaccaaatataacattttttgtgtacacgctcagacatgtatacctaatacagtgtttaagacctgcaagatttcattgatgaacaagttgctttgcttgatattaataaacttgccaatttaggacgtgatgcagacccagccctcatttctgtaaggattgaatcctgagtctgtaacttagccaatcataatgttattaaagtagaaatattctgtacttagtgtgggatataagtgtatataaagcaaccatgaactccacacctttaatgaatagaataaaaatgagtcattatattattcttatttatttagtttttacatgtactcttactctccattctgttttttaaatatgaaaatgaaatagcagcatgactatgcatagtatttcaactacaataaattataaaagtgaaaggcttacattttaatgattataataatttagaaaggcatttcaaaactttccattattttctattcaagtactttagtaaaatgggtgggtatatcaagaatcttagcagagtttacaagacactattcctggtgaagacccctctttccaaaaccctgttgtgaacaaagtcacgttcttactcacagctctattcttggaaacacattattttgcaaattcctaatacgacgattttctaaaaccgtcaacacaaacggacatcctagtttgtaccagaatatgtctccctcaggaggtggcttgggcttctctgccatggctgacagacattgtagaagcagagagtcctgagaaaaacagaaaagccctcagatcagaggaggaaagaaacaaacactaggaggtgttttggcaatttaaacatattccaggttaagcagcatcagaatggacaccagggtagaccataacctcagaagggcatagtagatatgatagaaatgtaggctgagattggagataagggctggcaggaaactcattgtcctccttggagctaagtggagcaaaaaatggaactctattttgggtgtcttggacaaggaacagaatactcaggagctctagggaaaaatggaattcgggtctcccctggggacatttatcagaatgaagagaaaaaataaacaggcagctgcatcctaaaggtatcaagtgagcctctggcatgaactccctgagagttggtttagcaaaagtagtaataatgtgcagatttgtgggacaaagctttttgaattaatgatccaaggatttatctctggctcctggatggtaatgaaagatcatgcaagtgtctcagtacaaccagctagggtgagttaggatgaagcaaagggtgccaggcagattaacattctggtataaatttgttatacttttatcaccttccttcttaaacaagttactaatcttggaaaaattagaaataatatgagataaaatttgacatgctcttaatgaactgatcaacttcaatgatctaatcgagtcatatgaatgaagtattctttttaacgttaaaaaatgaaatgttttcaagtgattaaaaatttaaaagaagacataaaataaagccagtattttattctataaccacctatgttgggatgtaaatcataggtactatagttgctgacaagggttccattctggtgtatggaaaggcatcccacagttatagtcaggctcatttactgtggactcgtgatgcccccagcagtctggctgatcttcagaagtgtggcaatctgttcttattccatgtaagtttgtctaccaagctggttgccgcagagggaaaaacattcttactgcttagaggaaaataaacttattcacttaattattcattcaacacttaccaaaattattaatacttaatcagtgctaagtcctggatgagctattcctcattcaatgaagaattgatgaatcactatgttataacattagtggctgacatcaaattgtccatctcaatagcacttcaagcaaacaaacaataaaagtgagctcattatttttttttcctcccaattctgtttcctttgacatttatatcaacattcactctgttgtctaaatcaattttggatttacctttgatttctccctcttacttaacactcatattcaaacaaatctttgtgctttatttattcttcatctaaaagtacttcaaaatctatttccttcttcattgtcatctcagtttaaactctaccatccttccacatgggattatgaatattgtctcccagccaacttctttgcctttctcttttgttgaattaacttttgatgtctactttttttcaaattttgaggtaagctaattttattcttttttaacataaattttattatgcatatttgaggtttataacgtgatgttatgggatacatacagagggtaaaatggttactctagtgaaacagattagcagatctatcatctaacatagttactctgtttatctgcttctaggagtcagaaaacatatagttacttttcattcattcattcattcattcattcattcattcataatctactcatttaatgagaattcttagtacaatacaattttattaatcatagttgtcatgttgcacattagatctctagacttgcttaatcctatatatctgtcactttgtgtcctttcctgtatctcccctttccccactcccttgtgcccttaataaccactgttttattctatatctctgtatatttgtcatcttttttttccaaatattccacatataattgagatcatgcaatatgttttctgtctgtgtttggcttatttcacttaacataaggtcttctggggtcatccatgtcgtaacaaatggcaacgtcttccttttaaagtattacccatggtttccagtttgcttccatatctttttttttttttttttttttgagatggtctcactctatcacccaggctggaatatactgatgtgatcatagttcattgcagcctcgacctcctgggctcaagcaacactctgacctcagcctcccaagtaggtgggggaacaaacatgtgccaccgtgaccaactaattttttattttttgtagagacaagatctccctatgttgctcaggatggtcttgaactcctaggctcaagtgatccttttacctcagcttcctgaagttctgggattatgatcatgagccaccctgcagagcctgtttccgtatcttggctattatgaataatgttacagtgaacatggagtgaagatatctttgtgaggtggcaatttcatctcctttatgtatatacctggaaatgagattgctgagtcatatggttgttctgtttttaatttctttagtaacctccatactgtttttgataatggctatactaatctacattcccgccaactgtgcactgggttcactttccaactgggttcaccttgccaacacttattgcttgtcttttaggtcatagccattctaccaggtgtgatgtgattatatcctagtgattttaatttgcatttccttgataataaatgaaaatgaggccaaaatgaaatgttgggcattgttatgtcttctttggagaaatgtctgtttaggtcctttgtcccttttttccttgggtcatttgattttcagctatcgggttgtaaatgatcttaataaattttggatattaatcccttatcagatatatagcttgcaaatattttttccacatttgtagattgccttttcattttgttgattgtttcatttgctgtgtagaagatttttagtttaatatagatccatttatttatttttgtttttgtagcttgaaatttactttttcctttccaatttggatgcttattgttattattttatcatcattattatcaattaattaattttcttatcttatatctcttgctagcacttccagtactatgttgaatagaagtggcaagagtgggcatctctgccttgtaccagatcttgatagaaaagtttacagttgttccctattgattataatgttagctgtgagattttcattaatagcttttattatatggagaaacttttcttctgtaccaaaactgttatgtgtttttatcaagaaaagatactgaactttgtgacactttttttctgcagctgttgagctgatcatgcttttatttttcattctgttaatgtgatatatcacagtgactgatttgcatatattaaactggctttgcatgccagggatatatcacacttggtcatcatgtataatttttttgacgtgttgctaaattagttttgctagtgtttcattgagtattgttacattaatgttcattagacataatttttttgctgtgttgctgaattagttttgctagtgttttattgagtatttttacactaatgttcattagacatattgacttccagttttcttttcctgtgggatctttctctagcttaagtagaaaggtaattctagccttgtaagatgtttttggaacatcccattattttgggaaagagtttgagaaggattggcaataattatttgaatatttggcagaattcaaccatgaagtaatctggctctaggcttttctttgtttaaaagtttttaatgtcttcttcaacctctttattgtattattggtttgtttaagcttcctattttgtgttgattcaatcttggtaggctgtattttttttctagaaatttgttcatttcctctaggttatcaatatgttaacatataattgttcacaatagccgattatgatccttcttttttatttctgaggcatctgttataaggtcttcactttcatttctattttatgtacttgagtcttcactctttttttcttagtctagttagatgttttttgattttgtttactttttcaaagaaacaactcttggttttattgatttttttgttttatttttctgttctctatttgatttatgttctgatcctttttattccccagttttattttcctttttcttttttctttttttttttttttttttttgagatggagtcttactctgtcgtccaggctgttaatgtggcatgatctcagctcactgcaacctctgcctcctggtttcaagcgattcttgtgcatgcctcagcctcctgagtagctgggattataggtgcttgccaccatgccaggctaatttttgtatttttagtagagacagagttttgccatgttggccaggctggtcttgaactcctgacctcaagtgatctgctgcctcagcctctcaaagtgctgggattataggtgtgagccaccgtgcccagcctattatttcatttcttctgataaatttgggtttagtttcgcttcttcactggttcctagaggcataatatagggctatatatttgggatcttttttttttttttaagtaggcatttcttgctataaagattcctctagaactgcttttgctatatcccataggtttttatatgttgtgtttctattgtcatttgactcaataattttttgttaaattctcttttgatttgttctttgaccaattggttgttcatgagcatgttgtttaaattctttatatttgtgaatttaccaagattccttctgttattgatatctagtttcatatacttatagttcaaaataatactagatatgatttctatctactcaaattttttaatacttgttttgtggcatatatggtgcattctggggaatgttccatgtgcacaagagaagaatgtatattctgctgttgttgtatggaaacttttatacatgtctattaggtcaatttggtcaaaattgcatttcaagttctatattttctcattgattttctaactggctgatctattattaatagtgaggtattggcatccactagtattattatactgttgaaagtgaggtattgaagttccctactattattgtattgttatctatttattattttatgttcattaatattggctttatgtgtttaggtgctttagtgttacccactcccctacaatttatacttttgttgtcacaatttacatctttttatcatatatttcttaatagcttattgtagctataattgtgaccattttgacttttaaccttcatagtagacacttgaaatatttacacattgtcattgcagtaatggaatattctgaattttactataaatttatttctatcagtgagttttatacttttatatatttccattatagtaattataatccttttatttccaattgaaaagctaaacattttttgtaaggcagttctattggtgatacatcttctgacattttgcatatctgaaataatttgtttctccttcatttttgaagaacagctttattggctataccattttaggttggcagttttcttctttcagcactttgactatcttatctcattcttttctgacctgtgatatttctgctgagaaatcactgatgatctgatggggattcccttttatgtcacttgacattttcctcttgctgattttccaattttctctttgtctttgacttttgacattttgattataatatgcctcagtgagcacccctttggtagaatatgcttgaagacttttgagcttcatggatctgtatgttcatatctctcacccaacttgggaagtctttagctattattttgtcaaataagctttatgtgcctttttccatctctttaccctctgaaactctcataatctgaatatttattcacttaatggtgtttaataagtcccatagactttctttttcttcactctttttcattttttttctctccgggttattttaaaagatctgttttcaagttcagacagactttttgctgcttgatctagtctgctgttgactcttacatgtacttcttatttcattcaccaccttcttcaactcgcgtatttctgtttggtcctttcttatatctatctctttcttaaatttcacaatcagattatgaattattttcttgatcttactgaattgtctatctgtatcctcttgtatatcatgaattccctttatatgattatgtattcatcttcaggcaatttgtaattttcatttatatggggttagctactgaggaactgttgtgtttctttggtggtgtcatgttcccttgctttttcatgtttcttgtgtccctgtgttgatatctgtgcatctagaggaacagtaactacttttaattttatagattgttttttgtaggaaaaaactttcatttgcagatgggtcttagggtgtcatttggacagggtccattgcctccagttctgtgtgagtgcagtggtgtagcctttgtgtatcttcttcagctgtgatcaacattattgataactgcagttgcctcagtggtctacactgtaggagtttgtggcagcgtagtggcagggtaagttgtatggttcttggtgataagggctttaggggtcttcctgtttatgtttacccacagtagagagactcagctgaggggatccctcttgctgtctggtttgacatgtcccataggcagccatagtggtgctgtactacaagacacaggtactcagagtggctgtagagctgagggcctgggctcaatgtcttgtttcattactataacacctgtgacattgatgcaggttcattctctgaggtgcaggtgggtgctgcagtcccactaagctagggtggtgactcttaggcactcctcagtagcttgaaaccaagagaacagggaggtagttgtgactctggtcctggggatcaaggtgtaatactgacatagctctagggaagaattggtgttctacaggcttagtacttatggatccagccatagctgcaatttagatcctggaagcagtggaggacagagacattttgagcactgagagagggggtactgtgtagtggtggctccggaccctggagtgctaggacatagccgtggccaaagccctgcaaggttggctgcatcagcagcaataacccaggaatgttggggcacggctgtagcttggactccggggagtagggggcaatacaaaggtatcttcattgcccatggaggtgagatgcctcagcagttcagattccaaaaggcttgtacagattcagggaagcaaggtgctgaagctcttcagcccagaggacaaggtaacccagctcagccaaggctctttttccctggggggaagggtgcctgttaactcctgttccagggaatacagctgctctgctggactggggtccaagcattagattgcttcaggcactgagcgggtattgctgttcttccagcttggcaacagtgtctctgctgggtgggagcacatgattcttagggactgagtgctgcatgggcttggatgatggaattgtgactgatcctctggactaaagctcaaattcctgagggacaggacactgggttggtgtactagtccattctcaaactgctatgaagaaatccctaggactgggtaatttataaaggaaagaggtttaattgacttacagttctgcattgctggggaggcctcaggaaacttacaatcatggcagaaggcagaggagaagcagacaccttcttcacagggtggcaggatggagtgagtgcaagcaggcaaaatgccagaagcttataaaaccatcaggcctcacaaactcactcattatcatgaaaaaagcatgggggaaccgcccctacgatccaattacctccaccttgtccctcccttgacacatgaggattacaattcaagatgagattttgggtggggacacaaccaaatcatatcaattgatttaggtactgaggggctgtggctgctttctggctcaagtatggcttcttggctgggcaggagtgtctggtcctttggtggcagggcaccacatgggctcaggcactgaggttacactgctctgtggggtcaaaggctaaatttccgaggagtggggcagctggttggttcagttgctgggggagtagctgctctcctgagcctaggctctgtgtagacaggggtggagctcagcagtgactgggatgcgggggagggattctctcctaggcaatgtttcccaaggagaaggagctgcagcagtttaactggggtctggtacttttccctgtacgagaatgtggtgtaatggtagtagagtctcagggatgaaagaatgcagtggctacttgttcctggggcagggcatactctatcaagggctccggtttcaagattgtgatgcacagtagcagcacggaccacagggggtggggtgcaatgtgagatcttttagagtagtgcagccatgtgaactccaggaaacaccctaagctgggcttagaacctgtgaacactgcagggtttttcagtaacaaagattataggtatccactgtggtgatgaaggttgctaggggcctcctccttcctgtttccatcatggcagaaatacttcctgtttctgagctgattttagctgggggcatgagtggcagagtcaaggctttctcgtcttatctctatgcagcccttctgagtttctgtgatccacaggggctcttcacggacctactctacttcagtgctttcctttagttgctctgaccaaaatatagttattcatttgttgttttggtaactgttttggtggagagggatgagagttaggcacctctagtgagacatcttgatgatgtctcaaaaactctatcttcctattgttctattttcaagtttgctaattccttgtgacatattttttctgctaagttcctgccggaagttttattatgattattatatatttcatttccaaaattttaatttccttattcatgttttctatttctttagttactgaaattttctattctttttttttattatactttaagttctggggtacatgtgcagaaggtggaggtttgttacataggtatacatgtgccatggtggtttgctgcacccatcaacagtcatctacattaggtgtttctcctaatgttatccctcccctagccccccaccccccgacaggccccggtgtgatattctcctccctgtgtccaagtgttctcattgttcaactcccacttatgagtgagaacatgtggtgtttggttttctgttcttgcgttagtttgctgagaaagatggtttccagtttcatccatgttcctgcaaaggacatgaactcatcctttcttatggctgcatagtattccatggcgtatatgtgccacattttctttatccagtctatcattgatgggcatttgggttggttccaagtctttgctattgttaacagtgccacaataaacatatgtgtacatgtgtctttatgatagaatgatttataatcctttgggtatatacccagtaatgggattgctgggttaaatagtatttctagtactagatccttgaggatcaccacactgtcttccacaatggttgaactaatttacactcccacccacagtgtaaaagtgttcctatttctccacatcctctccagcatctgttgaggatatttgtatttgcttgttgaagaacttttgttgacaaataattctaacattctgtcatctcagcattgcgcctctttttttttttcttttctttttttttttttttttggtcaatcaagttgtgatttcctgtctcttgctatgacaagagctattttattatatcttgtacattttggctggtatgttgagagactctggatcctagttcagtcttttatttcaacaggcagttacactgtttagcttaaccatgtaaatactgatctaattttctggccaacagttttaatgacagtttaattttgagatactatttttatctgcttaattggcctgattctattaggtcttttgctaatccttcttggtgccaccagtgaggaccaaaagtgcttccccaggcagggttatctccattagctaggctctggaagagcacttttcctggccccttgttttctgtgggttctttcctgattcctgcctcagcattcaggcatcatgggttgctcagtgtctggtgtaagttgtaaaggttggggaactttagtttccaggcacttcccttggcctcttgtaggcaggattccatttcaataaagggaggaagggtcctgcctgagctgctttttcgtactgatttgggaattataagatgcccatgctgtatctctttgtgctggtgtgggagttggagcaagaactggaagatgttgaggcacagtgttttccttcaatcttgcaatccttaaccagtctaccttcctctttccacatctcagagtcctcctatggttgtctgttgtgttatctttaaggtttataattgtacgtagaggagaggaacaaggaatgatgagtctatgccatctcatccagactgcctttcaagggtatctttctttctatagctcaagttcttattactctctaatttaaattattcagttaattcccatcactctcaagtaaaatcaatacttcttaatctgaccttatcaattaggaccctgtgctacatgtaacagaaaccacaatccaaataataattaatgaaacctctatcttggcttatatctgtaaagctcagagtcttcaagggaggcctcatgccaggcttaaaccatatcaccagaatccatcactagtctgctttttctgattggctctctcatagtgtttataaaatatttgccacatttttcttggggtcagcttattcatgttcataccccaaagcaagaaaaatatatgtagaccctaacacatcccacccttacacaccaagcaagaaggctaaatgtcatgggtttcatgaggtaactttctccatatttgaactctaagtatgtggtggggtcagggaaggcatcttcttactcctgtttcctgaagagtgtgtagtagtcaatatttcctgaagcacatgggccgtaaggaagtaaaaattcagttcctgttatttaaagaaagggaaaatgggtccatcaggaccaaaaaaaaaatcctgcaaatgtaattacagtggtttacaagtactgccttcatctctacttgtttgctttgctactttccactcgtccagtgtatctttttgtgctcccaagaaaccattgagaagcactttcagatttttagatgtatcatctttttccaccttgaagactatggtcatgctactctctttgcttgaaacacccaactccattcttcttcagtactatggtttgaatttatccccaaaattcatgtgttggtaacttaatccttaatgcaatagtgttgaggtttttaaagagatgattaagtcatgagggctctgcccttacaaatagattaatgcagttatcaagggataggttagttctcacaggattgggatcctaataaaagggtaagctcagccccttcccttgttcctctttctcctgcatgtgctgtctcacccttcaaccttttgctgtgcaataatgtagcaagaagggcctcaccagatgcaggtcccttggccttggaatttccagcctgtagaactgtaagaaatatttgttctttataaatatttatttatatttataaacagaatacctagtctcaggtattctgttacctcagcaaaagacaaactaagaccaacaactgatactgagtagcgagactgttgttataacaaatacctgaaaatgtggacacagctttggagttgggtaatggctacgggctagaagaatttgaatgagcaagctagaaaaagtctagatcatcatgaatggagtgttaagggcaattctggtgagggcttagaaaaagacaagaactttcaacagcttaccaaccaaaaagagtccaggaccagatggattcacagctgaattctaccagaggtacaaggaggaactggtaccattccttctgaaactattccgatcaatagaaaaagagggaatcctccgtaactcattttgtgaggccagcatcatcctgataccaaagacgggcagagacaaaaccaaaaaagagaattttagaccaatatccttgatgaacattgatgcaaaaatcctcaatgaaatactggcaaaccaaatccagcagcacatcaaaaaacttacccaccatgatcaagtgggcttcatccctgggatgcaaggctggttcaatatacgcaaatcaataaatgtaatccagcatataaacagaaccaatgacaaaaaccacgactatctcaatagatacagaaaaggcctttgacaaaattcaacaacgcttcatgctaaaaactctcaataaattaggtgttgatgggacgtatctcaaaataataagagctatctatgacaaacccacagccaatatcatactgaatgggcaaaaactggaagcattccctttgaaaactggcacaagacagggatgccctctctcaccactcctattcaacatagtgttggaagttctggccagggcaattaggcaggagaaggaaataaagggtattcaattaggaaaagaggaaatcaaattgtccctgtttgcagatgacatgattgtatatctagaaaaccccattgtctcagcccaaaatctccttaagctgataagcaacttcagcaaagtctcaggatacaaaatcaatgtacaaaaatcacaagcattcttatacaccaaaaacaggcaaacagagagccaaatcatgagtgaactcccattcacaattgcttcaaagagaataaaatacctaggaatccaacttacaagggacgtgaaggacctcttcaaggagaactacaaaccactgctcaatgaagtaaaagaggatacaaacaaatggaagaacattccatgctcgtgggtaggaagaatcaatatcgtgaaaatggccatactgcccaaggtaatttatagcttcaatgccatccctatcaagctaccaatgactttcttcacagaattggaaaaaaccactttaaagttcatatggaaccaaaaaagagcccgcatcgccaagtcaatcctaagccaaaagaacaaagctggaggcatcacgctacctgacttcaaactatactacaaggctacagtaaccaaaacagcatggtactggtaccaaaacagagatatagatcaatggaacagaacagagccctcagaaataatgctgcgtatctacaacgatctgatctttgacaaacctgagaaaaacaagcaatggggaaaggattccctatttaataaatggtgctgggaaaactggctagccatatgtagaaagctgaaactggatccctttcttacaccttatacaaaaatgaattcaagatggattaaagacttaaacgttagacctaaaaccataaaaaccctagaagaaaacctaggcattaccattcaggacataggcatgggcaaggacttcatgtctaaaacaccaaaagcaatggcaacaaaagccaaaattgacaaatgggatctaattaaactaaagagcttctgcacagcaaaagaaactaccatcagagtgaacaggcaacctacaaaatgggagaaaatttttgcaacctactcatctgacaaaaggctaatatccagaatctacaatgaactcaaatttacaagaaaaaaacaaacaaccccatcaaaaagtgggcaaaggatatgaacagacacttctcaaaagaagacatttatgcagccaaaagacatatgaaaaaatgctcatcatcactggccatcagagaaatgcaaatcaaaaccacaatgagataccatctcacaccagttagaatggcaatcattaaaaagtcaggaaacaacaggtgctggagaggatatggagaaataggaacacttttacactgttggtgggactgtaaactagttcaaccattgtggaagtcagtgtggcgattcctcagggatctagaactggaaataccatttgacccagccatcccattactgggtatatacccaaaggactataaatcatgctgctataaagacacatgcacacgtatgttcatttcatcactattcacaatagcaaagacttggaaccaacccaaatgtccgacaatggtagactggattaagaaaatgtggcacatatacaccatggaatactatgcagccataaaaatgatgagttcatgtcctttgtagagacatggatgaaattggaaatcatcattctcggtaaactatcgcaaggacaaaaaaccaaacaccgcatgttctcactcatagatgggaattgaacaatgagagcacatggacacaggaaggggaacatcacactctgggggctgttgtggggtagggggaagggggagggatagcattaggagatatacctaatgctaaatgacgagttaatgggtgcagcacaccagcatggcacatgtatacatacgtaactaacctgcacattgtgcacgtgtaccctaaaacttaaagtataataataataaaaaaattaaattaaattaaattaaattaaaagaaaaaagaaaaagacaagaactgtagcgagagcctacattttcttaggagttacttaagtggttgagatcagagtattggtagaaatttaaacagtaaaggctactctgacaaggtcttagttgtaaattaggaatagggtattgaaaaatggagtaaataccattctttttataaagttgcaaagaatatggtggaattatgtctgtgtccttggactttgcggaaggcaacactttagagggatgaactaggacatctgtcagaagaaatctttaagcagcaaagtgtttacagagctacgtgacttcttttggttccttatagtaaaatgagagaagagagaaatgattaaagatggaatttgtaattaaaaaggaaacagaatgaaaagatttagaaaactctcagagcctagccaagtaaagcatgtttgagagagaatattaatagtgtgacaaaggtgtttgctaaagagatttatatggctagaaaaacaccaggttctgtttgtcaagacaatgggagaatgatcctaaggcatttcaggtgtgcagaatgcaacagctgtagggccatggcgatctactcctaaatttaaatggatgttgcgaagaacctgtgagccaagacagaggcttgtcacagggatggtgccaccccggagagcctccactgaggaaatgtccagcagagccataggagtgaggccactacataaactccttactctcataatgtttagtggagccatggaagtgaagtagaccctgtgaccccagaactacagagcaaccaatgtgcaactgcatcctgggagagctgcagccataagactctaacccattagtgctgctgggtggactgagccaaacaaaaccctagggacagggcttcatgaggatgtggggtcccactgccttcccattgtgcccagatgtgagacaagagctcaacacagattattgtctagttttaagacatgatatggtttttgttgttgggtttagtactgacttggggcctgtgatttctctttttgtgcctctctctctctcttttaaaatgggaatgtatatcctatgcctgcccccccattgtgttttggaagcatgtaacttttttgatttcataggctcacagatggaggggaatttgcctgaagataaatcacgccttgagtatgacccatatctgatttagatgaggctctggattttgaacttttgaggtgatgctggaaccagttaagactagggtgagataaaaagaatttattttgtgtgtgagaatgacatatgttttccaagccagggggcagcatgctattgtttgaatgtgtcactaaatgcaaaggtgttgagaaaggggacctttaaaaagtgattatgtcataagggctctgctttcacgagtaggttaatgccatcattgcaggagtgggttagttgtcatgggaatgggtttctgataaacagacaccctcctctgtctctcatgtttgtgctgtcttgcccttccaccttccactacggtatgatgcagcaagaaggctctcgctgtatgtgggccccttgaccttcgactttatagcctccagaactgtaataaataaatctctgttctttattacccagtctcaaattttctgttattatcagcacaaaacagactagacatgcagccattttccctctagacacatgcacacacacctatgacctatgtcttgtattgtttcttatgcttctgcattcatttcaatacttgctctgcaactctctcttacactcaaaactaggtgatgccctactgattttacagcctcctttacttctttcaccatcacacttattataccctactgcagtggcctggttttagctgtgtatcccactaacttacaagaaaagaattgtgtcttaatcacaacttgacccttattacctaacaaagagcctcttgagtgatccactttaaaaaactctaggcgatcatatcatgctataagtacatgaagaaaagaacaattataatgtttaggtaaacaaggaggagcctttgtagtaggtgaaccttgaaaaaggagtagaaattttccaggtcttagtttcaagaaggcatttcaggcagtagaaaggtatttcatggagacaggcaagtataagagatataccacctgttaaaatgaaactgaacagatccccgtccccatgggcgttatccatctgtgccttcaaatccatgctgaggctgcttctgcaagcttaagaaattggtattttgcagatccctggagtccacatgacattgtctggccttgtttgttactgctcttttttcagtgtgtaggaatgaagaatgagtgccaataaatctgaatgtcaaaagtcaaatacaaatgtcaaggccattccacatcactggttgttttgaattctgagcccaatttttgcaggctactatggtggggagaaccacttggctatgtctccatttacttatcaaaggctactccaggcataacagacctaggctgcaggcaaatggccttcttatgccatacaagcacagactaactcatcaaatgaaaaagaatagagtttgaaattcctttatgagttttaagaatatttcctgtgagagaaattttgaaagctgctcaattaaaagcaactgtacttcatatattttattttattgtgttgttggcttcatttaggttgaaattagggaatctagcattgttattggtgtttacttttttgagaagtagagcaactcaaattattcagcaggagcagaagggtttggttgatcctatgttgtatttatgccttatatggtattttaagatcttatacaggtaaatagaatcacataaaggtaagaaactaccggagctgtggctcatgcctgtaatcccagcattttgggaggccaaggtgggcagatcacctgaggtcaggagttcgagactagcctcaccaacatggtgaaacaccatctctactaaaaatacaaaaattacctgggcatggtggtgcatgtccgtagtcccagctactcgggaggctgaggcaggagaatcgcttgaacccaggaggaggaggttgcagtgagccaagactgcaccactgcatgccagcctgggtgacagagtgagactccgtctcaaaaaaattaaaaaatgaagaaaaaataatgaaaagagaataaactatctcctttgagaagacaaaggagaaaataagatatattaagctccgagtttgaatcaggaacttaaaaaatatacatatgttattttatttaaccctcactggaagcatgcatatttgcccaatgcctaactttatcaaatgttaatactctgtctcaaaaaaaaaattttttttttaaatcataccctatgtggtcttttgtgcctggcttatttcacttagggtaacgtattaaatattcacctatgtcatattacatattattctttgtattgcaaaataatatcctaatgtatgtatacgctacatatttatcagtttataaacatttgggtcattctcaaatttgtgctatgaacattcatgtacaagttttcatgtgtttatgtttttatttattttgaatatatatactcaaaaggaatagagtgctgggtcatctggcaactccatgtttatcattttgaagaactgtgaagattttacatttccaccagaaatatatgagaattcaattttcttcatattcttaccaacactttttgtcttcttgttattttagtcattataatattcaagaaatggtatctcactagggttttaatttgcattccaataatgtctaatgatgttgaccatcttttcatatgtttgatgaccattttaaaatcttctatggagcaatagctattcaaataatgtgtccatttttaaatgagttctttacatttttattattaaagttgtaagtgttctttatatactcagtggacaagtgtcatattagaaataaaatttgcaaatattttatctcactctatgtatcttctttttatattatttgaagtttattttgcctgatattagtagagctacttgagctctattttggttgatgtttgcatggcatatcatttttctatccttttaccttcaagatatttgatacatataatctgaatctgaagtatatctcttgtagatagcataaagttggatcatttttaagtccattctgctaatatctgccttttattggaatgtttgacacatttacatttaatgtaattgttgacaagtcaggatttacttctgcctctttgctctttgttttcaggcattatgggtctttctttactccctattcttctatcacagccttccttagtattaaatgaatatattaaaataccattttaattcccttttttttttaacgatgtaattttaaattttatttttgtagtggtttccctgtggattacaatgaacattttcacttaaaacaatgtaggaattcaataaacatttttacttaaaacaatctaggattgataacaacttagtttcagtggtagagacaatctttgctcatggatagttccattttctcctccttttgcactgttatcattagcatatgcatatgactttatgcatcataatataatcaatgaagtttttatgtattgcttaatgtagctgccctttaaatcaaatgggaaagaaaggggcttacaaactgtattgtctctaatatttatttatgtagttatctttatgggtaccctgtttcttcatgtgaacttagggtactgtccagtgctttttctatttcttcattttagcctgaaggacaccctttggtatttcttgtagggcaggtctgctattaattaatattctctttatttctctcatagacatacctttacttctccttcagttttgaaggacagtttcgctattggtttttttctttcaacagtttgaatatgtcatcccaccacatcgtggcttctatggtatctaataggaagcctgctactaatctcgttggaaatcatatgcgatgactccttttttcgatacctttacaattctctcattgtatgtgtgttttgacagtttaattatgatgggtctaagttattatgtcttttagtttatcttacttggaggtcattgagcctcttggatgtatgaattaatatttgttaacaaatttggggaattttcagccataatttcttcaagtattctttttgccttattttctttctcatccttctaggacttccattatgcatatgtcagtgtgattgatggtaccacatagtctttttgaggctttgttcccttttatttatctttttttatttctgtttctcaaaccataaaatctcaatttagctatcataaattcactgtttttttccttctgcctgcttaaatctgtttttgaacccctctagtgaacttatttcaattattgcccatttcaatgacacattttatttatttattttaaaaataatttctatataattattaatattctctgtttaaggtattattctcatattttatttaattatttagatatgaagtcctgtagtttgttcaacatattatgatacgttaaagtatgtttaactgacttaaagtttttttttattaacatcaatatatgtatgggcatccttggagagactttaacttactgctgtgctttccttttccccttcctgcccccacatgggtttacttttatgtttctttgtgtatcccataatttttattgaaagctgaacaatttaagtaacgtaatgtgacagctctgaaaatcagattcacctccacttgccaaagctcttatttgattactgatgtttattgctgttttttttttggtttttttttcatttttggtaactttcctggaataattctgtaaagtctgtattccttatcatgtgcagccactgacatctcttttccattaacttagtggtccactgatttctacagagattgccttaaatatcttcatcaagtagaactctcttcctttgccaaatattcacatttgtgctggggcaagccttcagtgctccagcagtttacaactctgtaattaccttcacttcttggtttttcaggattcaagatcagacagaggtgagagagtagggcctgctgggatctttcctacccttgtgcacaactctgttcatgcgtataacattgtgaatccctgggaatatgtagagattttcaaagcccagtaggaaatattattccccatattttcatcttaagctttttgacaagcttcttgtttgccccaacttgctttgctgcctcaggcatcagccacgttaaacaattgctgctgattgcttcaacaaactctcttatgatagggctttcctccctgaatgagctttaagtcaggtcagataaagtttaaaaaagtgacagttcttcagtttggaacttctgaagatctccaaactctacctcttccagtgtttagtggacttctagtttttactgcttttatggctgctagattgttaaattttaaagttcacacagagctggggaaagggggatggaaatagagcttaaaatgatacaaagcttgctggttttgttgttgtcatttttaccaaggttctgccttttttcttctataaacactccttagattgttacaagcctttggtttatttctagagttcttaaaaaaagttgattttttttacaaatgttacctatctttcattgattttatggagagacagatgtttggagggacttactttatcatctggaagtaattagatgtttggagggacttactttatcatctggaagtactcttcttcattgataggtcttaaaagttttggcatttcagtacaacatagatttatgtgaatttatctttcattattctgctgggtactcaaagggaattttaatttgtatctttaattctgaaaaattttcaccagttttatcttcaattattacgtctttgttattccttctgttcaagactttgagtcttattttgtttcctgttggagcttttaatctattcttcatctctattaggtgttatttcaatgttttttgtcttggtcttgctactgcattctgagttaaattttaaatattgtcttccagtttaacaaactcttctatattgtgactagtttttgaaatttttaggatgatttaattatttttttattttaattgagggtttttatttatttatttatttttttgacggagttttgctcttgtagcccaggctggagtgcaatggcatgccctcagctcaccgcaacctccacctcctgagttcaagccattctcctgcctcagcctcctgagtagctgggattttagacatgtgccacaacgcccagctaattttttgtatttttagtagagatggggtttctccatgttgtttaggctggtccgaactcccaacctcaggtgatccgcccacctcggcgtcccaaagtgctgggattacaggcataagccaccacagaggttttttgtttgtttgtttttttaatcctaccaataaactcagagttttcttctctctctttttttatttttaacaatctcttgggttttttattttggtttttgaaaatgaagatttaaaaaaaatttctctcctgaaacattcgtctgtaagttttaaaatgttgatcattccatctggagtaattcttctgtgtattgtttgtgatggttgtaattttaacattaaatttcacatgaattttggaatttggatttgctggctcatttttgagtgggagtttgttgtgtttcattttacttttcctctctgtttatgcttacttttttctccctaccatttcttggctcacattaaataatgaatcactataatgtaattggacgtatctgtgctgagacagtattagggagagggtagatatggtcacccagtcaggaagcatcttattgtctcattttaagtctctggctgtcatctccctaggcctgcagctaccaggaactagaaatctgaaaagtgttcagtgacatctctctacccccttatttattctggggagatttaaaacttaagccttctcagatccaggtgtcattcagaataaggttatgttgcaatagcttataaccctaacatctctgtggcattaaaaaacaacaacgaagtttcatttctcactaatctttaatgtctgttgtgggtcctgtggctatgtcttatcatcacttttattctgtgactgagatagatgagattgtctcttcctggatcaaaagcatatgggaaaactgatcagtggcttctaaagcttcttccacaaggcatcatatcatttttgctcacattccatagactcgaacaagtcatgaggccaagcctaacattaataccacaataaagtagattctgccccactagagggttaatattttatattaaagtataatatggtctaccaaattctctttcacttattttttttacctgtaatagtgtaacctttagctaccactgtctgctttgattccctcaaactgcctgaactattgcttcagctgtgaacaacactttctatttctattctattctgtgtacttgttttcttgattttagcccaattatctctctgattttctatttttctctttgtgtctcattgttctatgtttggagcataggaaggtgcctcagataataaattaaatatcctatctcattcataatggcatcaattttttttggtggaagaaaaacaaacttcacaaatccataattaaatctcctctctctcccacaaatcaccttttggaatcagttttagtatcagactagggaaccaacatcctctgtgtctggtatgagatgcaatctttatatttctttaaggttttggtgttaattgatccagtagaatttttatgtaaccaaaatttattccttggcctgaaatgttctctaattagttactataaactggtgcttattcagccgagctgtgcaattttgggacttttgggttaataaaagcctaatctgctcatttgtttacactgtttactccctaaaggcttatgctttgtgactgaaaacaatgcttaataagcagaagaaagcatgttaattgtaggcactgccatgctgctgtgtacctaagagctgggcttggctgcagctcaaacaggtcttgggtagaactaaccaagttgccctcaagcttaacttccaattgtcacaaaattcatcttgggcttagagatgaattttaaatacatcgaagagtaaaatgctctgttaccagagtgggtcagtggagctcagctaccatcgatctacactctaactctcttcctccatcaacctttacatcctctaatggaggaatgtctcccatatgaaatagtggccactcacccaaatgtaatattggtgacagacaaagggaaactaagctctaacctctctccccaccaaaagttcacatttcttcagtcaaatcatcatgtggacagaaatcaatttcttctctatgctgtcactgagaaagagggaatatataaaactcacgtataaaaatacagaagtaaaatgaagatctctatgttaagtgagtactatccagaataattgatttccattactggatatcttcaaataaatgattgatggtaatttgatatcacaaaagagaaagcagtattttttataaaaaagctttattggtataacagaggtataatgacattttttaaaaagttacacatgtaatgtatataaccttaatgagtctggacacttgtgatactgttaccacaaccaaggtgtgaaacatatcatcaagaccacagtttttgtgtatgtgtgcacattcatgacaggatatgtgttacagagctaatgtctttattttaaaaagctttattcatttggattttattccttactattatattctttattcaacagttgtctttccatctcatctctcctgattcttccccatgctttaaaaaatgttaatgtcttcttgagactgtcaaaaacaacattacaacaaatttctttatagatctaattggcttttataggtgatacatgaatcagggcagccttcattctacaaaactgaacaagtgttcttctgggcaggggcaaaacactgggttttgaaaggtgaaaagtaggaaatagaaaaatggaaatctagtaagcatcatattacctcaggttactttttttaaaggggtaaagcagaagagacttccttattaggattactgaggtaaactggaatctcttgttttcaggaaagattgttttgtttggggatctatctgctttcttaaattttcattttaattatgtggcatttagcatgagtgactccattttggtttggtctggtcgtttagggcctagtgcaggagttcagtctgaaacaatggcctcccataatcttgtttaacaattctaaaagaaggtcgttcctttaactctattcctctctgtggtttcatccctctcctttaccaatcgattcatatttacttttgtatgttctcaaaggcaagttaaataatactgcatactgaagtctgttcagtgtccccacaatcataataaaatgtctaagacagacttatgagcttctcaaactgtgttgtgggtgtacttttaggctcatgtgagatcatgaatatggtgcattctcctgaagtatcaattttactcagtactgaaaacattattctatcattaaaacaaacacaactagattagagagtatattgcaaaatctccatgaacttaatactaaaataagagtctgaaagccgactggtaccccagattgtcaatcagctcctattggaagcctgtcaagtccaccatagagcagcagccaaaccatttcatgggagagaacgaggactctgcagcgaagtctgaaagtgctgcagccctctggaccctgtggactctcaaaactaatcaaatggaatgtccatccaagacaaagccccgcaccaatgtgaaattgttgagagaaaaccaaaatttatcaaatagctacaatagaagcaaaggaaataaagtggtaaagagagagagagggggaggcaaagaaaaggaggaacaaaagcagcattaccacagtgaatgtgaattttaaaattattttctcatttattattttgcaaaaatgacaggagagggagccctagagccataatgctagaaaactatcctgacccttcctctttcctaaaagtacaaagaaactccaaagaagaaaagaggagaaagatgaggaggaggaggaagagaggagaggaataggggtaaaaataaatcttggtcaactcttatacaaacttattataaattcttacagggaaggagaatgaaaacagaatgatgcagacaaggaaattatgccataaagctagtcccaaaacaaatgaaaactacaacctaatattttttaaaaatagctaaaataagaagctatgaaaaaaagatgtataccagaattagaaaaactctgaaaagaggcaattagaaaaattaagatctaaaaagagaagtaacaggacaaatttagaaatgaaaatgaacctttttacaatcagtcttcatttttactccattgcgttcgacactgttgttctgaaagtctttcctgctctggactctggaagatgttagtccttctaattctcctgcagctactgcttcctgctctaattcatggctcttcatcactgccatagaaatgggacgtttcctatggctctctctgggccacatctttcagttaacttggcccagtggctgcaacaacttttaaagtttataaataactttaaatatggctgcatttcaaataaacccctcacttcttgacctgctccatacttgactatccaggtgcctttgggatgtctcactggcatttcaggtgggtcatgtccaaagtcacctactcagtgcttaaatctacctctcatatacaatttcataatttggaaaacaatgttttttttctgtcactcagattcaaaactccagaagcatccatcactgctttcttctttgtcatgttcattatatcaaatgtccttgtttgctcatgtctgcccccaaagtacctcgaatctgttctctcctttaactcttcactgccactccctcaacaccactctctacttgcaataaataactgttttttgccttctctgacttcattttgtctcatctgctagtgatgttgtcaaactgatctcaattggtagatcggagttgtcttctaggggagtttatgaatgtaaacaaaactgtgaatgtggcctcctgaagttgcatatttgacctggctctgtcttcttcagggcaacagattctcaacctggttttgttgttagtacagttgaaagaattaattttaagaaaaacaagtcagaagaaattacagtgcagtaactagtaaaataatcatgactacattaaaatatttttaaatacccttaaaatggttcaaggtattatcctctagaagtgtattgctatttattgccttttcaatactcttttgtatacctgaggcaatgtctttgagaacctacttgaaaaaaagtgtaacactgttttcctcttactcacagtaccttgtaccctgatatttgtaacatcacaaaacccacagagttaggggctgaccaaatatacacagtaagttatagtattgggtaaatgaaacaatcctgcaacaaaagattcttcagttccaatacagaagaataaaggaaacacaatttaattttgagaaagcattaccaggttgacatgtatataaggtggcacacaagaaactataaactctggacagaatcttacacaaatctatacagcagtcaaagaaagaacaatagaaacttctcttatctccttgagagataaatagatgagccctgtcatctgctctatagttgtgagatagcacagagctaatttgtaggtttacagttccaaggggaagaaggccagaaaactgaatcaaaaggactatcttgtttgggggtttattaagtttacaaggaaacaccccaaaggaaaaaagcgtgagtatgaagccacttctctcctcaaagaaaattttataatttatttttacagttgcaactacaatcacttgtaaagacaaatcccagattccttagaaactagaagcatagtaatgaagagttctcgaaacatctgcaagctactgtgtataaatggaaaatcactgggctatagagagacggtcagattttttgtgtgtggaatttttaatgcattttgtaatctcacatcaacttgatttttactcacatttcccactcctacatccttatctcggaccccttgggatatagagaaggactggctgggctggagtcagttggaatgcagacagtggtaggtcacacagaggctctgcaggtgactgggagatactcaaggttcataggataattggatgtcagtcattctgatagtggaattcaatgatatagaagaggattatttagacaatatgtagtcaagcagtctgccaataatttattgagtacctgctatatgccaggggctagataatttccaagaacagagtatatcagcatgatagagttctaacaaaagatgctgagacttattggtgcggctgtatatctggagaagagctccggtgtctagaaaatgagagaggtaaagagattttaccctaggctgggtgcggtggctcacacctgtaatcctagcactttgagaggccaaggcgggcggatcaccgaagtcaggagttcaaaccagcctggccaatgcggtgaaaccccatctctactaaaaatacaaaaactagctgggcatgttggcttgtaccagtaatcccagctactcaggaggctgaggcaggagagtcacttgaaccggggagtcagaggttgcagtgaggtgagattgcgccattgcactccagcctgggtgacaagagcgaaattccgtctcaaaaaaaaaaaaaaaagacatttcagtctaacgtaaaggaaatctctctagaaactggagtattatgtaagagatggtcttttgagaaatacaggcagaagccatgtagcatttgttgacaacactgatgggggattcgtgcaccaggcccaatggtgaactctagaatctctaggtctctagggttccttctaattcaagaagccaagtgagacactgtagcagacagtgtctccaggcagggtactgagcaaagaggatagtgaaaagggcagtgaaacatcggcctttttcactggcaacttcaagactcactgcctacaatgtaagtattcctcgtattccctaacaacagttcaactggaagagtggtttctgtgaatccctttgactttttatcttgccttggtcctggctccatggaggtccactgtccaagaatagaagagctggacccgccatgatacacccttcgtcatgttggccatgtctggataggtcccttgacttcagtgtctttcttaaggttcctgcctttggttctctttgcttcctctttggatttatagccggtttctgactctcttgtgcttgaatcttatttctcggttttctgtctctatcgccttctagactattacttgtgatttaaaaaactatatttgctagctatctgaaaatcaagttaacattagcaaaatgttttagcaatgctctgggtttctacatctttacttttctgcggaaggtgagagacatcttacatttggttaggatatttcttagtttcccttgtgatttttggttttaacaaatgagcaagccccagggtgattattataacaattatttttacctacgggcaagaaagggaaacatattcaaccactaacattgacttagctttatttttaagcatcccaatcattagcaccattcattcatttaacaaatattgaactctgttttacagtaatttactgtgctgaatgttatagggaatgagagtgtgcatattacatgttaatgatattgcctagcatttagtaggtgcttaattaatgttagtacatttggctgttgatgatgacaaaaatgatgaaagtggcatacatagtattaatgaagtctattttctgtattataatatttggaagttataggagattagcaaacaagctgcaaagtaccaaataagatatattaaagcaagagttcagtctcaaatgctagtgaaggaggcatttctaaatgtgactaggagtctcccaatttgaattttcacttcccttaaggtgacctgagcagaatccaaatcctttgacttgatgtgggtggacagctggtgcacagaggagctaggggcacaattgagctggaaaggctgttaactgaagtatcctaagactgcctaattaaggggaagagatctggggagctggaaggtgggaaagaattgaattcttctttatcaaagggcaaaggcaaggttatgaaagtaaatgagtattgtgttcagatagagaaatagtggtatagtgaatgcagcaaagatacttcaaatgactgagtcctgggaaaaggagcatgtgatggaacatgcctattaggcagactagtgtgttccgctagagaaaagttgcacttcgaagatgtggccactgtctggaggtacatattttaaaccactgtatccatatcagtccaaccaccatgtttaatctcaggaatctggagagatttatccatggtatcgggatcagtaagcactggaaattaagagcgtaagactgaagtaactatgaaaacttatagttgaagtggtcactccatcagcttccttatgtgttggcaagatagtgttagaaaaacatctttctttttctttctgtcttcaaaaaatgagctgacacattccatctggaatgtgtcattaaggccagtagcagattgccaagccctccaacaatgaattacagccatcaagctgtggcattggagaagtaagggttaatcattgtgtcattggtatccacagagttcataattttggactttgtgcaaatggaaaattgtaatcttcagctgccttttgccaggctacagaatggcagcagagtccaatgtgatagacatattagtggtaaaaagcctgtttacctggtgcaaacagggcttatctttcaagacactatttgaagagtacgcagaatttcttgggagaggaatattctggaggatggatatattcacttgcccctgtggcatttgttttctccttgtaatgtctgtgtgatgtgatggtaaattcagaatatctgttccaatagacacattcaatgtaacactcaacatgatccattgctatcccatgctttgctttcttcgggttcctttaaattaccaaagtctcttgtatgtgagctgctttgaccagttttcattttaggaatgagaggaaagcatctcttaccaaaaaagtaggaaaattccaccattagttacccatttaatttgtttcaaatagcatgtgaaaaacagcagtcatctaggtaaaagaatgggctgaatccactagaggtgcgtagtatgagttttttaaccaaattcctttactctaatacttttgtgagatcagatatagttaaagaatgtttgattgggtgctaggaaagtgagagaaaacagagctcattcacgacagagagaggaggccctggtgtgttgccacaaatgagtagcatcttggataaatgcaaatgtctggaagtcaggggagagtggatattagcagaaaatgaatgtgcaaaagggtttgaaatatttcaaactttataaatcagcttgaggctactctgcatgatctaacttttttgaaaacaaacatgctgatcaagggggtcaaattggtgagctcaggtttaatggactaaaactgagaaactaaaaattacagcaactgccaagaaccttgcatatccttatcagtttatgatatttactcagatatattgatttcaagacaaaaatatatctttcaaattgtgtctacataaaatatcagggttaatgtagaagaacaggacaacccatggagtagtactatttaccaggccctttatttttattttttttaaattttttgagacaagatctcgctctgtcacccaggctggagtgcagtggcctgatcacggctcactgaagctttgatctcctgggctccaaccatctgccccactcagcctcctaagtagctgggactacaggcacgcaccaccaagcccagctaattttcggtttttgattatttttgttttgtttttatggtagggacaaggctttgccattttgcccaggctggtctcaaaatcctgggctcaaatgattcacctgtcttggctcccagagtgttgggattacagatgtaaacatcgcacccagcctccctaggttccttattttgtgattgtgttgaatgtttactacaatcctctgaactaacacaaagattttatgatgtagaaaattctggtttaaagagtatcaaagaaaccgtctgaggctatgtgaatcttaagggaggaattttgcattcagaactctgtgaggactccagacccctatacttcctgtagatgatcctcccctccagtaaaggcacctgtgttgaatgagtgcagaccattcaagggattcggttgtagtatgacaggggcagtagaaaactttatctgtggatgtgagagtcggtttagaagtttattttggaaatgtgtggtcaatattcttttaaattgcctgtaaatgtttctgcgcttatttgtgtgggactctaaatgacagaatagatagggaaatctagttacccatctatctcctaataaatcattgaagacaattgcatcaacagaagtatgtgtatttcatctttgctgaagggcacatttaaaaaaatgttagttcaataatctcatttgtaaatctcagaaatcttgtgatgtataatttttcaccttaaagagtttctttttctttcattcattcatttttttgactttatgagagaatcagaatctctttgacatcatttgcagaacattgcagatgaataaaagggtggtgattgagttattccggtgttgaggaaagagtgtgggctttcaagtcagacatgcccatgatgaagcgtaaatatgtattttgagttataaaatgaagacaacaatacttctcacaggatcgtggggaaaattaaatgagataatggctacaaaaaatatttagctcaataatttgaacacacgaagtagtccctccttatccatggcttcactttacggttttagttccccaaggtcaaccatagtccaaaaatattaagtggacagttccaggcataaacaatttataagttttaaattgtgtactgttctgaatactgtgatgaaatttcacaccattatgctttgtccctttgtccagcacatccgcgccatccgtgctcccagcccaccagtcacttagtagctgtttcacttatcagatcaaccatcacagtggcactgtgctagtgtccaagtaacccttgttttacttaatggccccaaagtgcaagagtggtgatgctgtcaatttgcacccgccaaagagaaactgcaaagtgcttcctttaagtgaaaaggtgaaacttctggacttaataaggaaagaaaaaattatatgctgacattgctaagatctatggtaagaatgaatcttctaagtgaaattctgaagaaggcaaaagaaattcatgctaattttgctgtcacacatcaagctgcaaaggttttggctacaatgcatgataagggcttaattaagatggaaaaggcattgcatttgtgggtggaagacatgaacagaaatgtatttcgaacgacagcaatcaggttcagtactgttcgtggtttctggcatccacagggggtcgaggataaaagggggccactatagtaagtgctcaataaatgctagccacaaaatcattatcattcttattgctataatcacacatgagaaaatcaattatcttcttcaggccttggattccaatcttgtaaagtgaggtttaaatgagaatgcatatgtgaagcatttgccttacaacacaaagccttaataagtgccagtgactcttctccatccgttttcatccagacaccactttcttgccaactaactgccctttgctaggcttgagaatgcagacggtcaaaattgacgctattttcagagccacagaatttcaacatagcctatctgggaaggtacacattctcaaatttaccttccctgactacagaagttaccaaatgtggaaactttgatccatactttatctaattagataccaattagctttctgctataagaaatgtactactggggttagtactactgggggttagagcatcccaagtatattgaagccaatcatgtaattttcatcagcttttcttagaactcatttttagtcagtgctattcaaatgtattatgcacacaaatcccctgatgaacctgtgacaaatgaaggttttgtttcacaaggttggggaagaggctggaggttctgaatttctaaggtctcagttgatggcaatgctgcaagaccatccctttgagtggttagagtcttgggtccttgctaatattgtggtaggtaatgagccctcaccctagttagactgcagctttcaccagcagataccatcggacattcctttgatcgtatatcttccactatcagctttgtgtctcattttttcagcatactttcatttaaacgtgaatgcacttagagtaaaaccactcactgctcctcaaataattccctttaatcttgtctctgcgtcttttgtccctgtgtctttcttttatttatttatttatatttttctttttagtacccttcccctttgtcagctttgcaaaatccttccagaccctgtttaaatctttcctcctccgtttagaaactggcttgaaggggagaggtgtcattgccagatcttgaggccctgggaggaaatctgctggaaggtggggaggtgtatggaggatggaagcagacacatgagttaagaggctgatgtattagagcatgaaagaggtgacgtggtcttgaatctgggatgatctccaaggagatgttcctgatgagcttatgacttgggcaaattggctaagcaacctgagcctctgggcctttgtaaaattgcagagatggtcctatagtctctaaattatctttcagattaaatattctgaatttggtgggctgtaagcaaatgtgcacaggcctgttccaaagacttcttagtttggatcagtacattttagtatgtcacttctattgctaaaaatctttattttcaaatttttctgtcaaaggtttttctgaaacatcaactgagaatgaggggaaaatgttgctttaggagattttatctaatcttattaatagcaaattgtatagagatttcttatgaacatttaagaaatagaattcattcatcctaatctactgctagagaagcatttgtttatagagagactgggtcctttcatatcagaaagcaagtgacacctcagggaaacatcagctatggctttaagcagatgtgagtgtcaacaaggtttgagttcctcatgtgccttattgacacttcctgttataaatatgacttataggtcttttcaacaatgacaatgacaattgaggcctgaaattatgcccgattgtctgaatacttagataagacggcattattttctatatattttatttgtgatcaagttctgtgattgcctttctacttagtttttgctgtttttataaaaatatatactaaagacaaaaatcctgacctcattcacacatcacgtattagtagagcatgtatgaggtattgggtaatgagctaggcttctactcacggacctacaattaatgtgagaagtgaagctaaagacccaacctgatgattagttgagacttttcaagtatttctctctagaaaaggcattgatttgaggatgttgtttcacatttctgagatgcatctaggagttgtcatgtaccattagtatataaatccggagtggctaatcaggagggaaaaagagaataatttaggagtgacaaccagatacgtagagaagatgatgtagatgacagtctgatgggggtactggaattagtgcatagtacttaggtaagtctcatgtgttcctctgcagtttggatcataaggttgtctgatagagcctgttgtagacatcagataggcaccatctgcatgtaacccttcctatttctatttgtcctacctgcaaatcattttatttttgaagcacatctactcattgtctacatagactttaaagactcacactatattttatttcaactgtttcctgctttcatgtgatggaattacagctttccacacattgtttgctgccaagaccctaattggttattggacataaatgtcctgggagaaagtcaccatcccaacatgagttttagcctcttgcttttccaaatgtttgcaatatctttccaacaatttctttccctctaatcatgttctgcttctaaatgagacatctgtcaaagtacataaaaagacaaatgttataaaagtgaaatgatatctaatttttgacttatttagggggcatcttgacttacatgttttcattacacttgaaatataataattactgcatgttcaataacatcaatttgagcaagtaaacttgcaaggactcaataaggggaactgacagtcatgaatacctactttgtgtctggggatttgctaacattatttcattaccttgcaacggggtgtgtggagtgttgctactcatgtccacctatgtaaagttcagaggcctccatgagtccagaatacataattacatgaatcagagttaggatgtgaacacacatccataggactacaatgtaatttcctttcttgttggaatttaaagtgtgatccaaggccagcaacatcagcatcatctgggagcttgttagatacacagaatctcaagtgccaccccaaagcaaactgcttcagaatctttgttttattaataataagctcccttgatgaatcctatgcacattcaagagtgagaaatactgatttatacatcatgcctccaaagcaagcttctttttccctttttccctgtttcctgtcttctcttatatggctgcaaagacagtcatatggcatactttttaaataaatttatttcatttattttttcacaaaacacatctaattttctttgaaacagtccagggactcacagtactattccttgtttacaaatcctttttctttctttacctaaatagtctcctctcacagacaatttctttccttcttcatctttctcaataactgcaaaaattttctccaataaattgactcccattatcgtaagggggtagatgtatctggtgttaccctttctgtgttgtgaatgaggaacatttatggttaattcgtaggttcttcacttattttcatctcatttttcatgtatcttgaataattgctctcataaatgcccctcaaacataatttctacacacgtagtaaaaaaaaaaaagcacagtagtcaagtcgctattttgaataagcaccttagagtttctcctttcattttgtttatagcttataaatacagtttctacttacactgtgtatcacacagttaaatctgaatgatacattgagatcattttactaaatgttccagaaaataaatattcaaattcatttaaattcaataaaggagtcgactcatttcattttactattacaaattacttataatttttggtgatcagtgacattatgtaattaaacacacacatttttcttttaattttgagatatttttatgataatataaatgtgtgagatctttcatagatgattatatatgtgattaacttttttagatagccttagaatgaaaaaaatctctccaattaaactgttattttttagaaatacttcattagctttttctgcaatgacaaaacttttacctatttatgattaatagaattacccatgcttcatgttttaaatcaaacccggaatttagacaactaaagtaatctcaaaattatgaatttattccttatacagctacttatttattgttttttcacctgtcctgggataagatgataaaacaatatatggctcctgccataatattatgattaaacccacatataaacactaaaattacgtgaatttttactaaaattgcatgaattacatgtattggggtcagtgctacagtgttgtctgttcacagtagaggtgctatttggcttgagccttgaggaataatggcagatcaatgggtttagtactgaaggcaaagaaatgaggaatgctggcatatgctgtagcagtgactgagaggaggcgatggtgggatatgaagttggacaagagggtcaaggccagttcaagacaacacatgcaccatgcaaagaagggaacagccatgagaagccattaaagagccccatcccatattatccaatatatatttagtactcgccatttgccaatgattgtgctagtgactgtgtatgcaattcagttgtgtatgtaaaggagaaaaaaaatgatgagtctcagggcatattaaacaaagtagaagatatgggatttgaaccaaagatccactgttttcaacactcattcttcttctttataatcataaaatatatcatttatacaaaaaatatatattatatttataaaatgtgaaaaaaacaacattagtattcccatgtaccccatttaaaaaatgtgaacataataacaccattgagacaagtcctgtgctcctctgagatgtaaattatcttccttagcattcctaagtttgtaactatgtccccataatatattatatcttatcatacagaaacgtatttaaatagttttaacacataatgtatattttggtgatttttaagaaattcaaccttatgtttgtgagatttgtccctgttaacgtggctgtagagaatttactttcagggttcatttgtgtttcaacctcatttcttgtttctagatttttgctttactatcaatgacactagagaatttttatgtaagaaatattcatctttaattctgcaagagataatcctaagtagttttccaggtttttttcagtgatttacacccccattctcacaatctgctttccatgaccttgtcaataaaacttcattattttttttaaatttaagataatctactgggttgtaaaggcatttcaataatccaatttctacacaggtttttttttttcttataacttgttgatttttatatttctgctcttgtgaaagccaactcctgatttgaaagttgctttttcttattgatatatataggataggtattttttacatattctggatactaattcctttggcaattatgtgtcttgtaaattacctcccagtttatggcttgccctatgattttgacaggcagaggttcttaattgtagtacagttaaagatatcagcccatcctaattctttgtgtgcttcatgtcttgtttaaaagtagccctaccctaaggttatggatatgtattggtctatttcctttgaaaagttttaaagatctggtttttatacttaagtataaaatccatttgggattgacagttgtgaatgatttagcagtggatctccaatgctgtttttttctatgtgaatgtttttgaagagttttaggctgagatgttgcactaggttcatttttgcttaaaatggactggattagtatgtgactaaagacaaacagatcagtaaagaagtgactgaaggccaggcactgtggctcacgcctgtaatcccagcactttgggaggccgaggcaggtggatcacctgatgtcaggagtttgagaccagcctggccaacgtggtgaaaccccgtctctactaaaaatacaaaaattagccaggcgtgctggtgggtgcctgtaatcccagcaactcgggaggcggaggcaggagaatcacttgaacccgggagacggaagttgtggtgagccaagatcgcaccactgcactccagcctaaaaaaaaaaaaaaaaaaaagaagaagcgactgcaatagtccaagccagtgatgctgagggtgtgaactaggtcgctggtaataggaagaatagggagacatacaagatattaatacttaaaagccactaaaaacaggatttgttatctaattttaatgggtatgtcatacatttttctctttaaattcttatgaattttcagaataaaatatactactgccctactatggagaggtgtccttgtgtgtcctttacttgcagtgttcttcctttagtcatttgcagggccccttccttcacttccttcaaatctccactgaaattcactttttcactgggggctcctttgagcctcctttgcaaaatagccatatctgtctcccaagcatatatacatacaaacgcctggcaatgaatgcctgcctagctctttaccatgatatgtattgcttcatatgacttataaccatcttcacatgatttgttttgtaatgtttatattttcactagataacaaactctatgaaggaagaagcttcacctgtttgttcactgccatatcaccagagcctacttctgtatccattaaatattcgttgaataaacaaaagggcagaaagaacttgtatgtcaatgatgtgcgttccctttttagaaagggaggcttgtggcgaccttctaaagtttttggaattttaaccagcttttgtttctcctgcaatggtgaaattctggggagatatcagtgacccatttggcttagagctaccttcctattagattctattgtaacacttgtggaacaggtgaaaagtaaaggtgacaggcagtaggaaccattgggaatacaccaatttgggctgcacatgccgaggttagtccattcatcatctttattccacattgacagtaaaagcaatgatctctaaattaattagatccttagagataaagcaaaataaaactgtgaacattaataggcccgtatttcaacacctgcctggactgaggcaagctcttcctgttcaattgctttccttccctgccatggagctgcattcaccagcagtcctccagggggcaggctttgaaattttcagagttggattgcccagtctgtcttaatccatacttcagggaagaaaccatgatagttgactgaataaacatgtaaaacaccttgtagactggatcctacaatctttggtcacaccagagcttggcaagcatgttgtcttcaagccacactttagagacagaaacttaaagagatgtcagctggcttcagtgttggtatgaagcctgatagctcagctgagttaaatgactcccaacaaccaaatacatggctcttctagaccagggtttctcaaatgttaatatgtatataattatgtggagatcttgttgaaatgtaggttccagttcgctatgtctgtgtgggaatctaagatcctctatttctcccagtctcctctcagttgatgctgatattcctagtccctgaatcatcctttgagaagcaaggcacctagatttctggtcaaaatgctgaaaattaacaacccaaatttaaagatatgtggtttgttttgcttttttgttttgtttttctttgaggcaaattactagaaccaaccaaccaatgaaggttcttcggctcaagaacaaaaagtctactttgaaatttacattttgacatgaagcaaaataaaatgttaagcctagttatttttcatttaatcctaggtgagataaaaaataatactgcttctattaaactgacataattatagtaaaatgtgggtgaaataaaaataagatctttattgtatatggaaaatgtagaatcaacactgctaaaaaccacatcaataaaacaaaaaatgaatttaaaaagcacactcaggatgcaaaagcaacctctcaggagataaaaattagcataagagttatgaatgaaacaaaactcaggaccatagaaatattgagaaacctggcttatcacactcaaataaaattactcagtagaaactaacatgtagacattttctgataagttttgaaactgcaaagcaaaagttagatgttttattctacatagtacaaaaaatatgtttatttcaaagaagataaccagacaaaatttgaatttctcctctgcaatagtcaaaaccagaaagcaaaaagaaacatctataaaagtgttagaaaaatcaaatgtgaaccaagattttacatcttgacatgttgtccttaaatgtaatagcaacagaaagacattttcagtcatgcaataactcaagaaatttatcagcaggtatcaatctttgaaacctgtgctcatatcactcatggcagaccacagcatgtcctagatctgaaatgtatgagtgttttgatgagttaatcaagttaaagtaaaaaaaacacaaagtacattattcatcattattcataccctctgtttctcttttttttttttttttttttgagacagggtcttgctctgttgcccaggctggagtatagtggcaaaatcttagctcactgcaacctcttcctcccaggctcaagtgattctcctgcctcagcctcctgagtagctgggattacaggcatccaccaccacacctggctaatttttgtatttttaatagaaatgaggtttcaccatgttggccaagctggtctcaaactcctgacctcaagtgatccacccgcctcagcctcccaaagtggtgggattacagatgtgagccaccgtgcccagcctgtacctttttaaataagtcttagtatattgcattataacattgtagttgcttccatatgagacttcctcgagagcatggtaatcttgagaacaaagatctttatttacacttttacacctttatttgtattatcaacaatatgctcagaaaatgcttattaattaaacgggctgtcttttgtaacacagtctcatttatattcattctcttaactcctagatctgatcacgtttcagaattttgtggtggagaccataaaaatcattgacaaatcaaatttagagattgtatattgaagcgatctttccaaacccaattttaatttttaaagtaactgagggcccaaagctgtgtctgaagcatgacttggaacgtgtgtacacacaggtcttgagaggactatgggaaacagcagctggcctggcgcgtgactcctcagtcccagattcatagagcatcagggctgctacttagaagttactcgtactctgtgcaggtggcacggttcactcccaggaatgctcttcttttcattgctaatcattgttcaccattatctttgcaggctttatcaggatctcctttgatgtaatttgtagtataattgaattgcagcagatgaaagcatttcctcccaagctctatgactcataaccaagtggttttcaattatgtcagcatgtagctttccaaacaggtcttttcattgaccactatttgtatacactattgagttaactttggcaaacataccaattcatagactactgtggattctaattaaactgagatggagaaagataaaatgatcattaatttacattaaagagtagaacagggtgtttagagatttgcctaggattaattttataaataatattaatcactatcattactagtaaatgctaatgcacattctaaaacccagaggccgcatggggcttctccccgaagactaccactgatgaggaagcctgtggagccaggtttatgatatgggaaatttcttgatcctagtgttaaataatttagtattctctcatcctcccatgatgcctctatagtagaaaggccgacagctacttctgacccatgagaaaacatttcatcctgtaaagcctaagagagaattattttttgagttttaggaccaagaagtcagaattttactcttttattttcattttataataaccaacaatttcacatgtattttctgtataatttaaaaagcacttttataaatatcatcttacttcattctcagcactaagcctgtatgagtcatagtgaacacttgcacactatcatgtttggtagtctgctaagcactttatgtgagaggcctcctttaatcctcacaactctgtgttgtgccacctgagactgtatccattttacagagaaggaaagtgcagtacagaaagtttgcatagacttctagagatcacagagctactcagtactggagcaaaagtccaaacccaccatgctgatctgcttctagaaaaatgttctcatgattgttgctctgagagtgtgcattgcggtcatcgccgtcctcctggtttaaagaagtatcttccaaaacccatgttagtaagaggttggctttggtcataccatcctaggaaataattttttaaaatttgctatggcatcctgatgaaagtttgttgtgccttctccagagtttccataaaatgtccaggtactttttgctttcattttctgttccagttaaactcaggacctcccttgcatctcacctggaacaactgctctttactctttggcccaaatgtgagacctggccccatttcattgatttccccaccatttgtcaaagaaatagcaaagctttggggaaatgtatgaggtgttcacttaaaagcttacaacaaacatcatgagaggtttgacacttttgtttctttaaattttttgtgtctactacctaaatttcctcaaaaattttctcttcctgatctttctcttgagctctctgctttcccccatgtggctagaacccttctttttcctctcctgatgtcatgaacttataaattccctttggtctggaaatctcaatattctcattgtaacatgtgtatatgtcatgggatcctccaggtgtcacttcacctggaggttcacagaggtttcagctggaaacctctgtgtccggttgtgccttctgcctaagtattgctcacacctgctgggcttattccgcccacttcacctggcaggctgcactcggctcatgctactggcctggatcccacacctgctaagggtgagccaggggtgcagcagtgaggggtgtgtgggcaagcaagcacggagaccagccactgtgcactggctaggcatgctggctgctatggcagggcaggcagctccaggcgctagcacacgttttggctctgtgtgaagctgtggctggaccacatgtggtacatgtggcatggctgaatggtataattgggcatctgcatctggacgagaggaacatggtgttgcccagaagcttggagacaccaggaaccacagagccccaaaaagggtgtcacagccctggcttagggatcccctatgtctgggctccctgaacggccacagctcttctctccttcttgtcacccacaatgtggcaagtgggaggtgaggtgtttcagccatgttttttgttacagctcttctagtcctgccatttggcgtatcccgagttcttgtcccacatccaggacgaatgaggtatgcagacaactggagggtgatcaaggcaaagaggagcttcattgagcaacagaacagctctcaggagacccgaagtgggtagctcctttccgcaggcaggtcatcccgatgagtgtccagctctcagcagagaggagacccaaagtgggtagctacttttcacagacaggttgtcctgatgtctttctgtgagtccagctgagtccagggttttcctgggcttcagaagggaggaaatgcatgctgattggtccatgggcagccatgggtgggcccagaaaaagcaccataagttctcactcctggccgtggactccacctggaattccacctgaaggtgggtctttaccccttcccacagaggagcctgtctgcctcctacttccttaatcatgttgtccatagtgcccagtctgttcaagtggagggggcctgcaggcccacactgagccaccctcagcagccccaactcagaaggaggtggggctcccagctgttccaggctcccacaggctcagcagagcacgcagccccagccatgcttctcctgctgcaactggcatccccgcacccagctctggacattagatacacgtaatatctttgttgcagtcctcattttcccagaccatgcctgagagtgttccactttgtatggaggaatatgtgggtattttcataaatgaggacccctctactagaaagtaacaaagtattttcctgaacaaaattgtacttatctatgaagtagaagaaattgtatcagttttggttttaaattctaaatgatcttgccttttccacgctgctgaaaagatttccccagtttccagtcttgcattgtgcatttgtctcttcccctttaattcagcaattctactgatggctttccaagtaacagccccttctgtatcattgtggcctttggaacattttggttcctggactgcctttcttccaggacctcaatgaatctctcaagctacagatttcaatagcaaaattaccatttaatagctgagaaaactgaagcccaccaatattaaataagttaccgaaagccaaatggtgcctgagctaggactacaaacctgatatggtagattttttctatattttaagcctgaacaatgcaaattgcgatttcatataaatctcacagttctcagagttctgtggcctgtttccaggcacttgtgcttgttggttctttttctttttttgcataaacttgctttgtttgcttctcttacctctactcctggttattttgtccaaattggtccaagtttgattcaggtaagcctggactcttatctccatgaagaatgaaggtgtatgccccaaaacaccgaataaagatggactaaatggatgaaaagagctactcttggtaaggaagtttgccaggatattacactagaagttcaattcagcagccattaaaaggtctgtttccctggggagttctctactgaaaagacattagagcctttctcccttgcttctttttgtatagcagcttttacatggtagctgctgaatgcacagaataatgtggctgatccattgaagacccagcttgctcaggttagaaagacagagctgtgttactaggcaaagtgtaagaacaatttatgataaataagtgtgatgaagggaaggttcttggcttcactcaagcctgcggtggaagaaagcagctttacttaagcagcagtgtttatgcttggtgattgccccttgcagagcagggctagcccataggcagtgcgtggagagtagccacgcatgggctgttggctagctgcatttatacccactattaattgtatgcagattaggtggtgggttatttagaaatcaatagaaaatggggtggtaacttctgggtgttgccatgtgaaggggtggtaacgcagcgttgccatggcatttgtaaccgtcatggcactggtgggagtgtcttatgctgatgggcagtgaggacaactagaggttgttttctgtgccacttgctggttctggccagtgtcctctttggtttgggaaacaagccctgcaagtctcctacttcaggaggctgtggaagagggcaactaacttctcaggagggatcagaccattgcaggacaggaggcctgtggaaggaaaagaagacaggaggagatggttttcttattttagaaaaaagaaaggttttcttcttttagacacctgggccatgactcttcacttgttctttctcaagaacagtctggacactgagaccagaacctgggacttttaaattttaagcatatttttatgtatatgttgtcctgtctagcggagggtgggggagtctttcttttttttctttgcataaatctctaaattaaaattctccagctattgttacacataaattccagggctgcacagatcgatctgagtgttcccattaagtttctgattctaatgaagggaggactttacagcatcttccactgtctcccaacgcatcacacctcttcctgcttttccctgacccacctgccatttagaaaaacatattctctcagccctgctttgtgctctaaatgttaaatacatttgattgtccatacaattttatttgaaattcaatatctgctttggacagaaagtgttattgacctgctgtatccatacactatttactttgaaaataaaaaagtggatttactttgaaaagaaaaaaattttaatgatttttttaaaatcctaagtaatcatgatgatgcccttaagaaagtttttaaaaacataattagacgtattttgtaattgggatcattcagactgccaagtgttcaagcttttccttatttgaaggcacattaattttttaaaataatcattaacgaagaatttacttctcttaaaactaggttagctattgttctctctctgtctcaactaatgagtttgatattcacaagaactaattgtgagattttgtaaagccaatgctatgtcaactatgctggaataagactttatgagaaaaacataaacatacataagctgtcaaataaatcattctgaatgatgtggtagaaagcttggtgctaggagacctgataggaattttaatttacccatttacttattcatcaaaagtatataaagcactgatcctaagagaagcagcaaagccagctgcaatttcccagcagtgtaaccttgcgccaatgactatatcctctctgatcctttgtcaccctaaatgtaacatgaaggaaaaaatatccattacagcataatataataattactataaaatataatatttacccaagattcttatgagtatctgatgaggtgacatactaaaatagatgagacaacagagttggaagcattttagaagacctaaagtcattagtggtgtttgtgctaataatgaaacatctattactctgggtcctttgctgagttccataagaaggagaaggttatgtaagaccttattgtgggctttacatgctttggcatccagtacaatggaaagagttagaaaatagaggagcattgaaagagaatccccaaggctgggtttagtactgcaatttgcaaatgagggcattagtgaaaagcatcctccatggatgtgaagcagaacttgcagtaggcagcagtgctctgggagggcattttagagggggatacacagcactgaaccttgaaagatggagaaactcagtgaacacagatgggtccggaaatgcacacaggacatcagtctacttacaggatggtttccgagagcaacaaagtgagtgaaaagactaacaactaaaaatgaggagaggtttggatagcagagaagagtggagtgattcttccttaaaggggaattgacacttaacatcagatgaatgacttagaacctagatctatcagttatactttgcactgaaaagctacaaacttttaacacttagctgtcccatctgtgaatctctgtggctcattattgctgtgaggattaggtgaaataaatacatcacagtgtctggcatatattaaattcctaataaactttcagttttatttttctactttccttttccttctctttatattggcagtggggtttctggcccttaatttagagtggaaacaccttatggttttctcttatcacattttatgacttagatatctcttatgtttatatcatctgctccctacatagtctgggcccggaaatgattatactcagagcatctctagcaagacagctagataagcagataaatgcagccctcaactttttattaatcaattgaaactacttttccatttaaatcaaagccctttaaaacttccgaattatattattaatgtccaggagaagatatgccatcagttaagtatcctctgctgcctattggctgctgtctacttattgtaaaaaaactagctatttctaagtgttgatgatttcagatttgagttcatcttgttaagtggttcagaacatcaactcttagcatacattccctactgctaaataaaaggtgacccttcttttaatcgtttttgtggtttctcattagagaataggtaaataatgaaataactagagtcttcccttgctttcattcagttttgtgttgttctttccttccagttctttgcaactacacgatcaaaaacattttttttggtgcacattaaaaagactagagaaatgctttaatactttcgaagactgaatatcttaaaaatggctccaattctactgtcttattcaagcaaggtatttacttcttatttcttttctatccatttcatgaccttgttttatttcaagcactatcacagagtcagatggaccttaactcacctgagcaaaggcaacctagagccacacagctgagctgccctctttgtggcatcacgttgtccctctgccccacagagtcacctccccacttcccttttccagccctactgcccttttgtaagtgtaagacatcatttcctctcaactgcataacagaaatagcctctgaaagggcctttttacagctgatttcttctgtctccaattcatcgtccatactgcatccaaagtcttcttgccactgccttcaaaatttaaagctgattcctaaattatgaatctttgtcactgggaaggcaaaggacagttgcatagtctggttgagtgaagttttgcccacacttaactgaaaaaaaaaaaaaaaagattcctgtgccccttctgagacttgctgaatcagatttgaggaaaaatcctggaaatctataaacttagtaagcataataagtgacatttataagtggcctctttagaaagccagccctgcagagtacacagaatgaaaatctaaaagtctgagaatcccaggttagaattgcaatactgcatttaacatctgcagagagcttccaggtaagtcacttaacttccctgactacattttcccattgaaaaacagaggtattaccaacttacactcatcactactctgaggctcaaatatgacaaaatacataaaaaggctgacactcaatgtataattgaaccttccacttccctttttgatctaaacaattactcttctgaatatggtggaaaggttgaatggtacatttctccctccttccctgctaccctgccccccacatgccagctgggcttgcaaaaggcagaactggattccaaaattatagcagcagccagtatggtcttcggtttccctgcagacacatgagtcaatggagacccacaggactgaaacatagagggtttatgtttccctgaaaagcaacagaactggcgaaaacagctctgtttctcagagatgagtgcaaactggacttataatgaaaagtcaccaggatgtgcccagagaagtttccagcaggaacacctgcccaaagaataatgtgggaccgtgcttcagcaccacattccagaactctgagtccaaacagacccagactaccgggaagctcctgcaagcagagcaggacaggtgttgatgcacatctgagacggggagttcctgggctcaggagaagggaaagcctcctgagcagcagcccagcagggagagaggcactagccagtgggtctacgtccaagaactgccacaaaggtcttaatgcatggtgccaacactatactctggctattgccaagcttgactcctcagaggatctctggggtcataacttgctctacacaattgttctgaaggtgattgcaggtgtgatttctagaggtggcctgaggcaggctcaagtggaccccagattattgagacctagaaatgggaggcacacactctggttaggtgggcagatgtttaatgtggaatccagtatggggcatggtttgtaggcagcattttgcagaaaatatgtccaatatgccctgcctggttttgtgaggccagttccagtcccctcactaacctgtcctggagtctggatggcttgattaagattctggaccacagagaacccagacaactgaagctatctttccctgcaagtggccactaaggggtctttcctttcttctaaagctcaaagcttcaaaatagtggtgtgaggttgaataagccatttaatctcctcagtactctcaagtatatagcggggctaacaggctgactgcggctaactaggataacaattcgaatgcctagtatacctgttgtagagtgctagcctcattgttattccccttttacttttccttcttctgccagagagatcatctgggtattcatttgtgtgcttaccgtctgacacttgcatttacatcattatctgccactccaggttatttttctcctctgagagccaaggatgacaaaatcttccttagggtaatcctacctgtggagagagggcaagtacgaatggtgtttctctagtacctgcaggactagtaggtgtggggatgtaagagcactgaaatgaaaaagtgaacatccttagagactggctgctttgggagtaaggcagatgttctaacgatttagagaaactctcagaacaaagcagggataggctttgggaaccaggatatgggattctgaagtgggaacaaatccaaagaagcatcattcactcatttcacacatttatcaagacactagaatgtgacagtgaacctatcagacttgcttctaggcttatagagctgagagagtggtgagggagactgttatgtggtcagaatggtgcaccatcaacgttcccccactcccagttaggactaaggcactgattctcccagctactgggaggcttggctgctgacaggtgagagctcacagctgtatatctcttccagaattgcctttgcggaggagagctgacacaggtgtcagctagcatcttgcagctggtagacacagggacccagccctcttccctcatctcagacaaattttatcttcagagtaaccccagggcttgactgaggtctccgttgcagctgcattacagttcacttgttccctagacccagttcttttttttaattgacgtataattcacgcattataaaatacatccatttaaagtataaaatttggtagttttttagcatatacataaaaagttcttcaaacatcacccctatctaattccagagttctcatcacctgcctgccaataaaaccaaaaacaacaacaaaacaacagcaacaaaaatccatactcattagtagttgcccctcattcatacctacccccattccctggaaaccactaatctactttctgtctctatggctttgcctgtttcagacattttattttacatcttattatacttacgtagccttttgtatctggcttctttcattcagcataaacttttcaaggttcttttacattgtagcttgcaacaccatttcattatttttattgtcaaataatactgaattgcatggatataccacagtttatctttttatcaactgatgggcatctttcctctttttgattattataaacaatgcttctttgaatattcatgtgcaagtttttgagtagacatgtgtttttaattctcttctctatatacccagaggtgaaattgctgagttatatggtagctttatgttaaacatattgaagaacagtcaaattgttttctgaaggggttaccccatttttcattctcaccagcaatgtatgcggggcttcgacttttctgtgtccttcccattacttgctattacctgtctttttgattctagttatagtagtgtgtgtgccgtggtattccattgtgatttttattttcctctacctaacagctagtaatattgagcatcttcttatgtgcttacaggctgtttgtatattttttttgagaactgtatatacaaatattttgcccattttttaattatagacactttttttttttttttgaggcagggtctcactctgtcacccaggctttagtgtagtggcatgataatggttcacttcagccttgacctcctgggctcaagtcatccccccatttcagcctcccaagtagttgggaatacaggtgtgcacgaccatgcccagctaacttatttgcttagagacagggtctcactgtgttgcccaggctggccttgagctcctggactcaagacatcctccttcctcagcctcccaaagtgttgagattacagaggtgagccaccacacccagtcagttggtcattttttattattgagttgtcagagttctttatgtattatgcatccaagtcctttatcagttacatgatttacaaatattttctcccattctctatgctgtcttcactttcttcatggtgttctttaaagtacaaacatttgtcattttgatgaagtcaggtctatcttttttattgttttgttgcttgtgcttttggtgttatatctaaaaaatcattgcctaacccaaggtcatgaagatttgcacctatggatttatttctaagagttttataatttcagctcttatatttatatctttgatacatcttgagttaattttttcctttgtgcagttctgatcatcccaatactttacaggtattgctcccaagtacactacccaataaatctcttacactaaaatatttatctaaagtttatttttctagaatcagacagattattcatagaagtacaggtacaatatggtaattgaggaagtggtggaaactctaagcacagctgtccaggcagggttctgacggctggcatccttccaaagggcaggcagtcctgtagaacatccttactggtttggacttcttttttcccagctttgctctaaaatctatactattttatgacagtgtttcagtcgtagagttcaaagcacaggcaaattgacattcaaaacttattatcggatgaagttacatatctgtttatatatttcaacaagggaaagctaatcaatattctgtagcaattgttaccatgtaacatacgattaaatattataaaagtgagcctattacatgagaaataaatataattatgtttggtccaggctgttaaaaatgcatactttctatatattatatgttaatgtgcaagatggagtggatttctgcttatttatttaaaaagaaattaaagtagtacatttagcgtacattgtgtgtctagatgtttacagattgattgtctttttggagatattttagcttattgtattgtaccatggagtaaactttatgctcagaagttctaaaggaaaaagtgtaagagattactggaattgaagatttttgcatttatatgtttaaattaaattttgattagctgttttaagctttgtcaagcattaggagctcataatcatagagagtttgatatgaaggataccataatcagctactctgtgctttcattttacataaaaagaatcttcaactcaaagaagaagactggggtaattggccccaggttgtggatgaatcagctatgactccatttggtatccatatctgaccattcctagccccagggctcagttcttgcaacaagctgcctggatgttttccaatgtggctcaatgctgttaatttaaaagatgcgtaagtttctgttaagacatttgtgagttggggcagaggaataaaaggcatgtagcttttttcatcaagtgtgacaacacctgggtgttaggaaacacacataatcaacttagatgctcatcagtggtgggctggatgaagaaaatgtggtacatatataccagggaatactacacagccattagaaagtgaaatcatatccttttcagcaacatggatgcagctggtggcccttatcttaagcaaaataatgcaggaagagaaagacaaatactgcatgttctcacttacaagtgggagctaagtactgagtgcacatggacgcaaagatgggaacaacagacactgggcctacttgaggtgggagggtaggaggagggtgaaaatcaaaaactacctatcgggtattatgcttaccacctgggagaggacataccttgtacaccaaatcccagagacatgcaatttacccatgttacaaacctgcacatgtaccccctgcacctaaaataaatgttgaaaaaaaaagccactaaaatagtatttcacatcacttttcattgctaacagtttgttccgtcaaaatactttctaaatggatccattattgtttgtcagtatataataacgtgtgtaaattcccatagatatgcctgagttttacacttttcatttcatatcagagaaaaaagcttgaaaaataactcttgatattgagaattttaacagtgagattttattatactcaaatgaacaagttctcatcttcatagcccatatgtgagactttttgttaccaaattgtaaaaaaaaaaaaaaaaaaaaaaaaaaaatcatgtaacgtagattaaaaatctaatttcaaagactggaacaacaacaaaaagaaaacaaaggcaacagcacacagatgactgtgacttgcctttggcccatctgcagatattaaagccctggggccagaagcaagtctttctcttgctgagagaggacctgcctgcagcaactcctaggaaggctgatgagcaggtagtacttcctggagcagaatgggccacccttctcctttggctccattcagaggaatagccccagggagaggtcctggaaagtattataataattgcagaaatgaaagaaaaaacccttgttctgaagcaaagggtggacttttaattttaatagtagctaattatccgtgtctgtaataattctgctgtttttgatgtttttaaagattaaaaacaaaatctcagaatagctttcataaatcaatttgaccttgccgtgaaaccaaaacaacggttaattcactcgaagcagagatataataggttcaaatagcaacatatctcccagagtcaatttcaacaagacaaaaacagaataaagtggttcatatttttatgttaaaagtaattttataggattccttttgttgcgctgaatttaaataaatcattataaacctaatatatgcctaatactgtcaccatgctgtggcaaccactgttaatatttccatgtgttttctttgaactttttttaattctttgcatgggtttttaaaagagtgttttagattctgtcataccagatggagaaacctctgcccctactctgaagggatatccccaaatgacattccttggaattctgcatcccttgaaaaaggacgactggctgtcttctgcatgagctgttccgagacccactaaaattggccagggtgactggtacagtcataggagggttcagccaagccatagcattgtccagagcaaggatggcgtaaagaaggctttaacaaaatatatttgattataaaaaaaacttctgctaggaatgtacaaagttcattgtccatccggacacccaggaataagtgagaggtacatactaattagtattttctaacattgcttacttctgccccctgcctagtcacaggctgagagaagaatgcagcaagaagcatcttaactggaggcccattctaagtccattttgaggatgaggaaacaggccagggaggttaaacgacttgtcccaggtactgtggctggaagagaggctataccttacctactctcctgggtgcccttttacctctgtctttagaggaagtgcatagatttttctcatttggctcttgagacctgggataaacatagtgctaccctaagtcttgcagttacaagaatggaaatattctgatttaagttatagacatttgtttgaattttaccattacacattttttaaatcacagataagatttttcacttgaatgaaaagtgaatattataaaccatgaaagcttatatgaggctacaaaataagttgggagtggctatctgagaagaaaagaaagatgcaaaatctaactggcaaaggaataaaatcaaatcagacaccaacataaccagcttcttccgccttcccttagatgatagtcctgaagctgctatgctgaacatctgatgggaagtaaaaggcattaacactctgtaaaacatggcaaggaatatattctataacagttcccctgcagatgaaaatttgccctgaggtatagttcctcagagaaaatgagtttttttctctttagtaaattttttaaagcctttttgtttgtttgtttgacagcctgtgctgcagttctaggttctaagcatatacaccttatattcctgttaatggaatttcagactcaatgtttgcctcaccttttgtgtatagttcctcaatggcctatattggatacaaagtcttacacagttttcacccaactctagtgattaaaaaaaagaaagatctgattggagcacagtgcagaaggagagagtggcatcattttggagctctgcatttctggatacctaccttgcctttgtcacttgtcaggtctatgattttaaagaataattgaactcctttgaatcaccactttatctgcagatgaggtctggaatagtcagagatggttttctgtaacaagtgagtttcatttgggatttgtataatcagaaagatgataaggggcaaaccataatcaaagccccagagatgcttagcaatgagagcaaccatgctgaggcatagtaaactatgacactgatcagataatcaaggtgaggtgcaaagtcaggtagaagtgctcagtgctgaggtagtaagaactagggaaccaatagaggcttttgactcatggtctgagaagatgagaaacagccactggaagacagatccagtagatggacaagagggattgatttgaatattttggagcctggggagtaacctagagatgaatatcgccaggtcattcaggtttttgtttggttgtgtgattacaactaacagagactataatttaaaagcttggtggaacagattactaacaaactaataaattatcccaatctcaaggctaatcaaacctatattttggttgatttttctacaaggttgtgtcaaggttataggtaaggggtgatcactgagtccccgtcaatgagatacttgcccctgggtggacaagtgagtactagttgccataaataaaatcaagcacctctgctaccaacatttttgcatttcacatcagagagctgagttccgtatcttctcatggtgatctttgatccaagttaaaggccgacattaatgttaacagtattttctctactgtatattgtgactcatttttgagttgcagatgagactgaaactagaacttctcttctttgcagagtcataagtcatgttaaaatattaaaagctcagaatagtcctaatcggtttaactttgtataaacactcagatatcttgcatttctttgtttacaagtccatttctcttgtaatttccctgaatatccaatggacctagaactgtccaaaacaatgtagacaatcgctaggtctaagatatttgactttaaccaaaattgttaacaaaatatcttttccttctaggacagtggctcaatatttaatttcattggaaaccacaggctaagtctgagtatatttatgagttatattttcagctacctagatgatttacaacatgataatttagaaggagtagaaaacttggagttaaaaattctgagttaaaacctatcttgatcacaacctaagactatacatgttcaatggatagtctttttatttattcagtgtagtttcctcatttataaatataataaaacccacctgtaggtaatcatgaggctcaaaaacgactgcacatgagaatcttttgtaatagctaagcctcattagaagctgtattctggtttgaatgtgcttgtagcctatatgtttgtgttgctgcaactcctaccttgctaaaaagagataaaggaacccatctagggaaactgttatgctaaggttgagttcctaaagccatggtgtacttcaaattagggaacaggaggagttgaacaagaccatcaaggaaaaaatttattatatacagatttctggcacgatttacaaataggcaggtccctgggctgatacagaacatgcaatgctgatatgttctggatatctgggacagtgtttgcaaaacaaatagaaattgaatgcctttatgttagtcataggactcactgctaatttattaatttacgtcttgctcaagacctatttatgtccctcctttgttcccaggaacattagaggttgctaacgttgctctaagacttgagcttaattaaggtgacctttgagatgaactggtccttatcagggccagtgaggccatgaagagactagatccaagcagtatgttttaactggcctacacaggtctccctcagcagccctgagccagggaactcaacaatattttagggaaacaagaagtctacttaactgataggagtcagatttgtacctgggactgctgatccaaagcctataaggaaaaacatagccaaaaagaatctgccttaaactgatgtgaactgactatccagatccatataattagaaataatattagaagacatcttaatgtatatagtatcttatggaacacagttttttttgtgtgtgtttttaagcagactttatgtaccaaattaagaaattattattttaatgatgaagtcttggctgggcgcagtggctcacgcctgtaatcccaacagtttgggaggccgaggtaggtggatccctgaggtcaggagttcaaaaccagcctgaccaacagggtgaaacctgtctctactaaaaatacaaaaattagcttggtgtggtggcaggcacctgtaatcccagttactcgggaggctgaggcaggaggattgcttgaatctgagagacggaggttgcagtgagctgagatcgtgccattgcactccagcctgggtgacaaaaaaataaaaaataaaaaagttatttgctctagggcatgcagatggaaaggggttgcaacaggtactggagtcagcattgctgtccaaagccttatatgcacccacccccccaactacctacctccctgggataagattactaatgacattattttccttaggagcagacctctttcacacagcagtatacaagctgttttgctttctacctgatgttgagaaaggcctgactcttagatgttgcctgatagctactattttctcactttgcatcacattagtgggagccgttgctggagagtttcataaggaacattctgttaagaatgtgtaaatttagattactaccactgggaatttaaaacaatgaagagaacaaattctgctaaaatatggctctgaccatctttaagacagatgctgtgaccgtcctttagctcatggctaatctgaaggagctagtctgtggagacaggggcttccttagcaatgcctcagataaaaacttgggcccagttctcaaactcataactgaaatatttcagattaaatccctcctccttgttgctgatcagtccacgtactcttttccttaaaccccattgaaaattcactgtcctctaggtgccatcattctgtagtggtgggagtacagattggcataacctttcagaaagcagacaggcaatacaaagcaataataatatatggcaatattaagggagtctatattcatgattgagtaaccaccatgctgtgaaatgaaatgtggtcaaagatttatatgcaagagtttaataacattgcattgttatttattatagcaactctttcaaaagtgtgcgatgagagggtattatttatataaataactttgcaatcatatgatggaatattattctgccaagataaaattatgtatttgagaaatatacttactgatgtgaaaaagtgcttaagacataataggttaagaaaagacagacagaagaggtatgcatgtaattgtgtgtgtgtgtgtgtgtgtgtgtgtgtgtttctgaacatcacaggcttcattagccgatggatacaaagagatcacatcaaagtccacagtacaatggtcttacaactttacaatcttctcacaaagcgagtacaaacctgtgctcagtaccaaacccaggtagactgttttctccctttcctggccttcttatcaaagctgtttccatggaccttgctgtggacatctttcattagaacgctctggtagctgtatcacttagaactcagggatgccattctattagaaaggaggtgctcttaactctcaaatttttcttggtcttaaatattgcattgagataagggaataaggaagaaaataaaaatgcatctaatgcctaaaaatatatggactgttgctaggcatttcaccccattcatgtcatctgttaattgtcagatgttgtcactctctctgtttttaatacagaacttcaacagatcttaagagcattctactcagtcattttagatttgaggtgctattctgctctctaggaagatagggagtctcaatcctgacccagactcagttcccgagtgcggtactgtttcccactgacagatgccactgactttgcctgcctgagtctctaaatattgcagctatctagctgtattccatctgcccacctgtttggactttcatgagtccaactgctttcctggcctcccaccagttgcctaatagcattctacttgatggaatccatgttccctgcccttctgcataccagcatctgcagccgaccttccaataccgatcccagcatagtaggccaatctaggtccaagaccaaggtctcctagcctaaggatttaccactgtggttaaccctgccctgcctgggcacaacaccttcacaattcttgaagcactacgtgccatgacacacacatttgaagtttttttcagaatcttccatgtttaaacttttggctgttccagtttccccaaattaaattatctggaaagagtgagcagctgaaatttgagtgcatttttgaagtttaagaactgaaaaaagaaaggaatatggccaatttaatattcctgtctcttaatccacttcacatgggagaatggaggtgaagtgaggttgtggaaaataataaagccaattactttgcctgttcctttgtttgatatactgcactcttttttattttttcttttccaaaaagcagagatcagccagtacaaaatggtggttttcccatcctgggtatatcaggcccagatcatcaattattattgcagcattctatatttgctctcatagatagtgaaagctttgctatattaatgaggaatttttgatttcaggctgtgccttctttgctcgtctcagctcttggctcttcctaaaaactgtattagccaggaaactgagcccactgattttttaatctatccttaaccctgccctggaacacttagcaatttaggcatgtggcaggaagaactgaaatttctaagccgttcactcctgagactaataccgagtcctcttcatttatccttgacctttttagttttcagccttgctccctaggggtacttccatgaagacagttgcttcctgccccatattaacaaccctcagtgaatgtcacagtagagtaacagcgaattgcaaataaagacggccaacaatcatttggcatttgaggaaagccatagcataaaacagggtcactgaacttaataaaaaggaaaagttatgagagtaaaggaaatatcatgaatggcctaatctttctgtcctggatggtctttattccttaataccatcaaccactcaaggtgctgctgtgtccctctcagaggtccactctcactcctcctacctgaaaagaaactcactagttgctaattaccaatatccacttagggtgagttggttgggacatgctaattcctccttgctgaccctactgtgatattcctgtgattggcctggtcatttttccctgggcctcacttgcagcaagctgcttaggtaggaaacacttagagccactcctcacattatgaggtaagattctcctctggttgtctgaagctgtaatctccattttcaatctggtcctccttcatttccagatgtgttaaggaattttttaaaaaatttctatctgttatgtcattaagaaggatttgtagcaggaaaacgaggctggcaccttttctcaagaagctatcttgacctgaaacttacattctttcatcatcatgccattttcatctggtttcctgagagctgcctttggcagtcacagttggaaatgacattttatacaggctcttatatcagagcaaagtatggtcctgataaaaggttgtgtgaaaatgttcagcaaacacctctcaatcccctgtgctttgatgtcctgcatgcttttataatggccacactccagggcagctggagacaggaaatttcatataactgggttgtgtctgaacagaatcagcacactccacgatgagattcaccatattcacatttggtatattccctttccatttctttcaaacttccgtattaaaaatgcaagatttacattagtatagaatactaaccatcaactattatcaaaggaaacagaatggggagatgaacaaagagaaagagatgacccagaatcagaaaccctgggttagtcttggctctcagtgattaagcaatttgtccagcatcacagatctacaatgatcttacagtctcaatccctcattttcttcttttacaaagccaatggttggcagaggctgactagatttcatgaccctccatcttgttcctgttctgagcttttatgaagttgatcttattgtcatcagcctatcatcagctttgcaggacagccagatgaaaggagtgcaggacagacactccttagaatccctttgtaagtttttcaaagatttgctttgttcagatctctgaaccattattggggactgtagaataggtactgaagaagaaagaatgcctcgcttaagttcaattcagtcctgtacactcagagtgatctctctgatatgagaaagggagttgttgacctttggattaagtgattccaagagaaaggactgtttagagcgagggttagcaaactaccaccttcaggccaaatctggtccaccaactctgttgtatggctgacaagctaagaatggtcttcacatttttaaaaaatcagaataataatattttgtgacatgtgaaaatcatgtgaaattcaaatgtcagtgtctgtaaataaaaagttgtattagaatatggccatactcagttatttacctattgtctatggtggctttagagctacaacagagttgaacagttgcaatagcaaccttctggcccccatagcctaaaatatttactatctggccttttataaaaaaaaattgatgatcattggtttacagagatgtattgagagttaacaatctgcaggacataaggaaagaatagcaactgatagtttacagatgtcttcatgggaaaggtattctagaagttcaaggacaagatattattgagtataaacatacacagagcaagaagcagcagtggatgtatacgcttacaaatgcacaggcagatgccccccatgtataaattttcaactcggctgtcctttgtgataacacttggcagaaaaaacttcaataactgaacacaatacctttagcgttgaccattgttattttcttttttttaattatttctatagcattgacattttattaggtattgtaagtgatctagaaatgatttttaaatatatgagaggatatgtgtaggttatatgcaaatactgtgccattttctttttttattttattttatttttttatttttattttttctaattttttttattatactttaagttttagggtacatgtacacaacgtgcaggttagttacatatgtatacatgtgccacatgtgccatgttggtgtgcagcacccattaactcatcatttaacattaggtatatctcctaatgttatccctccccactccccgcaccctacaacaggtcccagtgtatgatgttccccttcctgtgtccatgtgttctcattgttcaattcccacctatgagtgagaacatgtggtgtttggttttttgtccttgcgatagtttgctgagaatgatggtttccagcttcatccatggccctatgaaggacatgaactcatcattttttatggctgcatagtattccatggtgtacatgtgccacattttcttaatccagtctatcgttgttggacatttggcttggttccaagtctttgctattgtgaatagtgcctcaataaacatacgtgtgcatgtgtctttatagcagcatgatttataatcctttgggtttatacccagtaatggtactgctgagtcaaatggtatttctagttctagatccctgaggaatcaccacactgaattccacaatggttgaactagtttacagtcccattgttattttcttagcctcttacccattggcttatttgtgctaagttttgaggattcctttttaaactgatgtttaactgtattatattcagtgagtacaaaagaagtgagagtttcaaaactactgataagaaatggcatataattattaaagaaggaaaaataaagaagacgaaaaaataaagggaagttaacgatcactacctgataaatatttggacgcgaatcatgattttgaaggacaaagaatgaaatgtgtgcaaaagcagtgtggatacaacccagactaaccagctggtgcagagggacactggtaaactagacaatctttgcagtgtgtcttgtgtttacaacaatgcaaatgcccgttagattaatgctgttgagaaaaagaacaggagttttggaatgaaaggctcatcatggttaaaatgctgctgaaaaaatgcttgtcatgaggtgcaggagctttcaaaggaaaagggtcactattgtgtcaaagaaaacacagctcctagggagtcataggataaggcacttataggatcatcaacaaacagtagtacctgcatgtacgcattctcagagtatgtggaaattggcttatttcaaaaaacaaaaccactgataggctcaatagaatgttatcatccaggaggagcaggagtgatgcttaatttgaaagagttggagtgtctgcacacaccatcatttgctgccaatttatttagcactaagcttaaaatcctctttggaggagtaactttggtcttttaaagaaaagaaattaaagcaagtttttagaaacagacattagtaaatgcacgtgttcttgctgatacatacagagggaagcagtcagagagaaggatgaacagattataagtcaactctgaagggtgtcagtagaggttcagtaatgggcagagtctagaaaatattatcaatatatacagaaatgtctgtgtatgttaaattaagggaacctctgcagagacgaaaagaagagattttgtaccattcatgatgacatttgaaaataacatttttaaacctctcattttatggtgacaatagatgcccatctctttcacatagagaagtttaatttgaaataaaagtaaggaatattctttttattttatgatgacagtctcatgctcaacaaagatttagagaagttagtgcaacatggaaaattgagttgtggtgtaaaatgtataacttcttgctacatagctgattgtgaatttgttctttatatgaatttttttaaagaaataattgaagtttataaataaaatatttatgaatatgacttcattaagaccaggtgtcaggtgtatcttagttctgttttaattatatacatatacacacacacatatatatttcttttatgttctacatactctgctttatagctgaactcatctgtatttgtccattttcatgctgctgataaagacatacccgagactgggtaatttattaagaagaaggtttaatggactcacagttccacatggctggggaggcctcacaatcatggcggaaggcttgtcttacatggtggcagatgagaggatgaaaaccaagcgaaaagggtttcctcttataaaaccatcagatcagatcttgtgagacttattcactaccacgagaacagtatggggaaaaccgctcccattatatcccactggatctctcccacaacacgtgagatttatgcgagctacaattcaagatgagatttgggtggggacacagccaaactatataatcatcatccaaactgaaagttgtagtaggatttgtattaacaaatatttgaaatctgagttataatttgtcaaatctatgatatgcatctaaaaaattaccattttcttaaaatggttataggatactctaatattcagctagtaacaagtgctttttgggtcaggaaaacattttttaacaaactgatacttatcaaatcttagaagtttgatgtcattatgttgaacttctactacaattaagtgagaagataaatgcagagtaaaggtttctaatagcattttttatttataatctcaatatatgttcatttcataaaattttaaaaattaagagaagtgtgaaaagactctacaataccatcaccaagggataagtaataagtatttattttcttttatattttttaatctactatgtatatgtataaaaatatagatattattgagtaatattattgctttcattttccaaaactctcttctaaatagtatttctatttttagttataattttaaaatttaagtggcttcattgtttttataaaatatgtgattattttaaaatgtaacgatgtatgtacacaaaataaaaatacatgaatatatatttatatggaaacgtatacttataaatgataaaagaccaaaataaatgttactccaaagtctacaactcagtactaattatattaaaaattaagtgaatatctttctaaacaatcactctgctgatttatatctatctataggtattaaatatcccaagaatgtacagatatctccaattccaattcagtgttacagtattcattctagccttccctctttccttatgctaccttccttcttcaacagttaaaagtatggctttcattatctataacatatatacttatttgttcagtcctaatatgcacataaagaatcccacaattttcaacctatatctgtataaaaaacaagtttacttacttaagtgtagcatttgtgcacaaaaagtgtttgataaatttttctgggccaaaaatagcaactgtaggaaactgacaaaggtaggacaaagacatggttttccctcagatatccgcgtagttaactccttcactcccatcaggtagtgctcatgttcctgtcttctccgcagcctacgttggtggactattaatagcataatctcaccctccaccccacctagaccatcttgatcctttttctcctactttgtttcccatagcacttatcacattatagcgtgcatgttcaacatacacatttttttttaaagtgtacttttacatctctgaaaggtggattctgataatcaatgacatcataattcaattggaggcttgcaatgtactgtattttagatttaataagtcatggcacataatttgcttatttatcttacattctattttgcccaattaggatggataagttgacaaagtcaaagttattaaagagaatatcgtaactgctataagaaagcaaacctcaaatctcagtgcattaaaagaacaagggtttatttttctcttgtgtcatcgcaggcactctgttccacatagggaacagagcaccctctgttggattctctacctccagtcagcttaaaatggagagggttgaaaattacttaaaagtactgtattcaagagaaagcctggaattagagtttatcacttctgcctcgtgtctttttttttctgtattaatcagagtattctaattgctgtgatgttgtgggttgaatcctgtatcccctaaaaagacatactaaagtcttaagccctagtacctgtatcgtaatgtaatattacttgaaaatagtctgcagatgtaaccaagttaaggtgggatcatacaggattaattgggccctgaatccaatgcctgatatcttcataaagagagagaaacttgaagatggaggacacacagagaagaagttcatgggatgactgaggcatggactggagttatgctgccaaaagcccaggaacacaaaggattgctgccaatagccagaaactggaagaggcaaggaaggattctttcctacagccattggaaggagtatggccctgctaaccccttgatttaggacttctagcctctagaattgtcaaagaatgaaattctgttgttttaagccatttggtttatagtaattcattacacctgccctgggaaattaataccccactccttgtaccaaaatgcgtatcagcgttctctagagaaacagaagaaatatgaatagtgatgattaattagtatactgatctacattatactataatcacattatataatcatatcctatatgaagagatttattttagggagttggcttacatgattatggggtctatttagtctgagatctgtagggcaggccagctgactggaaattcaggcaggagttggtactgtatccttgaggcagaatttctttttccagaaaaacttcagttttgctcttcaggcctttagctaattgtaggatgaggccctcacaaactattgagggtgaacttctcttacttaaagtcaaccaattgtagatgttaaccatatctccaaaattctgtcacagcaacatctgaattagtgtttggttaaataactgggtactatagcctagtgaagttgacatataaaggtaagcatcacatatgaaaaagtaaatcaacatttttgctacttgacccaacaaaagtttatttctttctctcatcatggccaaatattgtgtctattggtgtggatggagaggaattctggcctccatatagccacagaaaaaattgggaatgaatttagaaatacagaacccatctcgcagctcatccctctagggctgcaggataattttaaaaatcacttgaggtcaggagtttgagaccagcctggtcaacatggcgaaaccccatttctactaaaaatacaaaaattttccaggcgtggtggtgtgcgcctgtaatcccagctacttgggaggttgaggcaggaggaacacttgaacctgggacacagatgttgcagtgggctgagatcacaccactgcactccagcctgggcaacaaagcgagactgagtctaacaattaaaaaataaagggcttcaagtgttatatgcttgttttgacttgtatacatgccagtagtgatgcctcatacagaacttggcttaccgaatgatcaatacacattaactctcttttttcctttcatatctgggaataaagttgatgaagctgcatcatctagcccaggaactagaatatatcttttttcttacattggtcagaactcagaaacttggctctgcttacctgcaagggcatctggtaaatatagtcttcctgtgtgcctgagagggaaatgaaatgttttgatagatacatcataaccctgtctttgctgtgtagggcttttctgctttgttcaatgttataatccaagcatctagaatagctcatacagtagttcctgctaattcatgagggacatgttccaaggccacagagaacgcctgaaaccatggatattactgaatcccatgtttttattttttaattattttcttagatacagcatctcaatctgtcacccataccagagttgtagtggtggtattatatgtcgctgctgcctcaaacttctggcctcaagtgatcctcctgcctcagcctgtggcgtagctgggactacaggcgcaagccaccacacctggctaaaactatattttcttttatacatgcacacctatgataaagttaatttataaattaggcacagtaagagattaacaacaataacttatgataagatagaataattataacaatatactgtactagacactatgtgaagatgatctatctctctcaaaatactataatatttttggaccataattgactatagataactgaagtcacagaaggtatatttgtggagaagatgggggactactgtattagactctgaaacatgcttattgcattagtaattgctatgatttgaatgtttgtcccctccacaactcatgtggaaatttgtcattataacagtattacgaagtgggacatttaagaggaattatgtcatgagggttacacccaccttatgggtgggacgggtgtcattctcaaaggacaatttagctccctttgctctctctgatcctctctgcccttccttccatcatggactgatgagcaggaaggcccttatcagatattggccagcccccaatcctagactttccagtctccagaaatgagagccaatatatttctattcatcgtaaattacacagtctgcggtatgctgttttagcagtacaaaacagactaatacagtaatgaaaaaggaaaatgccaacataaaatcaataataaatacaaggaattctgaaggaataagcttaagcatattagttattaaaataaatacaaacaactgaattctctcatctaaagacagatgttaggtgagcacagcaaagcacagctatctactgtttaaaagaaacacccttcaatgataagatggaaaatgaagggaagggagaagggatactaatcaaatgcatttaaaaaaattggaaaacataaagttaaaaagtagcaatattaatgagcagcgagatgcaagggaaggttaatgggatgaatcaggataaaatgagacattaagtaatgataaaagcacaatttatcaagatgatatccagccgttaaccaatataaacctatctacatagcaactaagtatatatggcaaaacatattagatttataagagtttgttgcaaacataattataattgaaacctccaacatatcatttgtcatagttaaatagatctatatataaatatatataagaacacaaataaattaactaagactatgaatgccataaatagctgggaatttaaatgaaattcctgcatattagcaaagaaaaataaatcacagacaatggcagaaattataaaagaaagctagctagctaatatgttctggtgagtgactccttttatgggcctcgtttatttgtttcaaaaacatttccttaagtgtctctttctaattaaatcccattatgcacaatgatggactctgtatttagtccttattgatacaatactgctgcactctctattaatccaaatatacagaagatgttgggagtcagagtgcagtgctggggaaagggctaaccccggatgccaaaactggttttgagtcctgcccttgttatcactgatgcaatttaaaatctctgatagttgcagtatgtatcttgaatcccaaactggagttcaagtttgagatattacttactagttatatgatcttggacaatttacttacccttattgagattcaacattcttatataaaaatggagaaacaatctctcgggatgcaagtctgtctacaacttaacaacattttacaggatagtacaaaatagttaatctcctaggatccaaaacgcctctacaatcttttttttttttttttccaaataagaagctgtatttgtgttagaataactaaaagactgatgaagacagtgtttgcaaaataaaataatgctttcctcaaaggaacaacaaaggattaattaaatgagtattaaaaaaaaagtctttgcttctatttctcaaatttcaaaaaaataggttggaaatttaaagggcttcacaggccaggagtggttgctcacgcctgtaatcccaacactttgggaggctgaggccggcggatcacttgaggtcaggagcttgagaccagcctggtcaacatggtgaaaccccgtttctactaaaaatacaaaagttttccaggcatggtgttgtgcacctgtaatcccagctacctgggaggctgaggcaggaggaactcttgaacccgggacgcagaggttgcagtgagctgagatcacaccactgcactccagcctgggcgataaagcgagactgcatctcaaaaacaaatagaaaataaaaaataaagggcttcaagtattacatgcttgttttgacttctatacatgccagtagtggtgcctcatacaggacttggcttactgaatgatcaatacacattaactatcttttttcctttcatacctgggaataaagttgacgaagctgcatcattgctcttactgtcataaccactgatgttatccctactcaataagcccttcctgaagaggccagatgatttccttttttacacttatgtcattattgaaaatgaggaattggtgatctacaaaataagttgtgatactggaaggaaaacgccaatgtgtgcttatacgtgtaaggcacaaggggattaaaaacatgcctgggcaggcaaaaaaaaaagggtgtagatgttaaaaatctttataggagaaagacagaagttgtgggaaatggataaactggaaatagaaaataaaaaggaaaaaaaacaaacagaaaataagtcaatgcaacatttgtctcaaacctttgcaatatatgagggagaaaagtagatatggaagagtataaatattttaacaaaaggaaaaaatgaataaaatgaaaagatacaacacagtggatattttatctaccttgaatatttctgtgaaatcgaatcacaaaaagtactaagaaggaatattaatgcaacctaaacttaaagctaccataaatacatacacacatatagcacactgagaagtgagtagacctcaaacttaaagtgcataagattaaccctgggaatttattaaacatacagctcatagaatttgcatttttatcatgcactgtagctgattctgatacagattgtcaacagtctatagttgagaaacactgtctggttgaactatacttcaacattacccccggagagatgaatgtcctcctagtattttcatcctgtttcatgggtgggattatagactcaggacaacttagagaactgaaaatcatgtttttagctatgcagcagataccactatactctgaatgaatactctgtatcaagcagaacactcacgaggcttttttctaaccagtggattttggctacgagagaaaaagagatagcaaacaagcttggcacaagattcagaagaaaagagacttgaagcctccctggaagagaagataagacaacctgcaatgcttagaggatatttaatttcagcattctgaaatttggggaattataatagcagatgatgattatgctctccacagatttattaaaatacattttaaaaaaatgcatttttatgaaacaaatagagcttactttaagggatccctgaatgattattatttttcagtatcaaatagaattcaaagaagaaagctgtttaatgttcatttatgaaggactgccaaaaattcaaaggtagaagattctctgcttgaaaaagcagaacaatcagcacaaatggaagattttgagagtaatgtcaagacggtgtgtgtgtacaatatgaagataataaaacaaatacataattgtaagcattgcatataatggggtataataacttctaaatacttcatttctaagaaaaggatatccacttataaacgatataaatctgaagttctcattacataaattctgcagtagtttggttttggagttgtggtgcaaacagaaccacatagaatatacaaaatacgcacctactatgagcgagattgtgcttgtgcttttatcaattaagataatgttcagctgcaagagccagaaaactcaattaaaccatggtttgagtaaattgtgggttttgtttttctgaagttgtgggaagtacagaggtgtaggagtctggggctgttacagcactgcagactcatcagagatccagttccttaagttcttctcatctaccatcgtagcatgtggttttccaaactcatgcagctgccttcgaattgcaggaaggctgctctgtccagcctccaggctgaagaaagagggcacccagcaaatggcatgtggcaattaaatctgtctttagaaagagcttttctgaaagccccatttggaaattatctgctccagtcttataaaacagcactgtgtcacatgaccaccctacatggtacaaagaaggctgcaaaattcaggattttagttggctacgttgacactttgaatagatgtggtacagtggcgagtagatatcaagtaggcaaatagcaatgtctaccaaattagatatattatctaatttaattgttttacaaattacatgcatttcatttcttcaatagatgaggaactgaaacatagaaatgttaagtaacttatctaaggtcaaacatggttactgaaaggtacagtctggtatgaaagcccatataattaaatgcgaatatcttttcccactatatcacattcctttaggtaccaccaagccaaatattttcagatggtaattttcagaaaaatgtgtatatcatgaatacttcagtcagatgtattttgatggtggagactacatttcctcacctgagactgaaaatttatttagggcaccgaccatgtcttcaacacttttgcattcccagtgcgtagtccagggttgtatcagtagaaaccttgagatgctggctaaatgtggattaagaaattgtattttaagctcacagaattcgacaagattttaaaattttatttattctaatatcctcacaaggttcacagagcatgttatagagtaggcattgagtaaatatttgctaactttaaataagtaattaaaatttgattttattgcgagatatcagagaaacatatatgcagagaaaaaagcatgacagtaaaaggagtagtttgtattagagtcatgagtttgacacaaagctcacagggagctggaaatgcatgaatggataaattggcctttgctgcacttcaatatgatgaatttcattgagtcactaaaaaatatttgttgagcacctactttatatctgacattgtgttggatgtcatagatacaatgaataaaacaacacaaacacgtccttgtggcttaaattttgtcttctaaagatgtatatgttatgtcctgcccaagactataggaatccaactcttgcatcaaggtaacccagatgtgaggacatggattcaaatgagatcattttggagctttatgatttgactgccctgctggatttcagacttgcatggggcctgtagtcccttcattttggtcaatttctccaatttggaatgggtgtatttacccaatgcctttacccacattgtatctaggaagtaactaacttgctttgattttacaggctcataggtggaaggtacttgccttgtctcacatcggactttggactgtggacttttgagttaaggctgaaatgagtaaagactttgggagactgtcagaagggcatgattgtgttatgaattatgaggacatgagatttgggaagggtggtaggcagaatgatatgatttggctgtctccccacccaaatttcatcttgaaccgtagttcccataatccccacatatcatggtgggagggacccagtgggagacaattgaatcacgggggtgggttttcccatgctgttctcatgatagtgaataagtctcacgagatctgagggttttataaagggtggttcccctgcacatgttctcttgcctgccgccatgtaagatgtgcctttgttccttctttgccttctgccatgattgtgaggccttcccagccatgtggaactgtgagtccattaaacctctttttctttataaattacccagtctcagttatatctttattagcagtatgagaatgggctaatacaagtcctaataccagtaactccaattaccttatttggagatggaggtctttaaacaggtaatcaagttacaatggggtctttagcatgggcgctaatcgaatataactgatatccttatcaaaaggggaaatttggacacagacatgcacatagggagaacaccatgtaaagatgaagggagagattggggcaatgcttctacaagccaagaaacagcaaagattgccagtgaaccatcagaagctaggagagtgacataggacagattctgcctcacaatcctgagatggaacaaacactgctgacaccttgatttcagacttccaccttccagaactgagagaggatacgttacttctctttaagccctctactttctggtgctttgttatggaagccctagataactaacacacagtgaagcccctgcctcacagagctttacattctagtgtggagcagaaaaggaaatagaaaattaccagagagacatggttattctttatatggtggtaaattgttaggagtaaagaaaagtagggtgaggaggataggaagtgctgctttatatgatgtgacctctgataagatgccatcaggagtgaaagaaggtgagagattgagctttgtaaatgtctgaaagaagagcattataggcagatgcagcagccagcccatggctctgaggaagaagaatgtattttggttagaagaactgctaagaggttaatgtggctgaattggatggagtaagggagaggggaaaggtaggaggagtgtggtcagagaagaccacatagattgtataggtccattttagattctgatggtgactttggcttctattccagagatgccatgggagggatgttcaaagcaaagggatagtgtgatctgatttaagttttaaagggatctctctgggctgtgtggaaagataacataggtagggagcaaaggtggaagcagataaatcagggagaagccttctgtagtaaaaccatccaggtgagagaagtggttggcttgaaccagcttgttggttggtagaagacagaaggggctacgtgaacagttagacaaagcattgcatatacaaggaaatgcttgacagaggaatggagacaagttttctagaggatgcttcaaggagtttccacttaggagaagcaccttagaggggacattgaatattagcactggaaggaagttggtgcagaagagaatttggcttgctgtagccatgcagtcatccagagcgatgaggttatcaaccattacaagattcactcctcccactcatgtctttgattgacatttctggtccccagcgtgctgctctcacattttggtccctgcaatgagcaaatgaatttcgtttcctctagtgaaagctcaatttgaacaacgggggaaaggttttatttaaatctcctacagctttgaactcatcttggattcaccatccatctgtcaacctgaaaaaagaaaaattacttaaaacaaaaattcaaactgaattgacaccaaataaaatatcaaatgctggtagcaagaatgatccaataggaagtgcttaacagcatgaaagctcaaaaattggttgaaaaattatttgcatctagctgtttaaatattttgtttagttgccatacaaattaccttattttagactccaaattttttaagagcaaaaaaaaaaaagaaatttaaaaacacagaagtttaaaataaagtaaaatgtaaagataacatgactttgagttcagtgagattgtatctaattttgaaatatagtaagttaattaaatagcttcttaattttgcagcaggaacaaatctcagtctacaaaatgtggggtggatgtgtgataactggccatagacatactgaatttaaagggtaaatacttgaaacctatcacctgagtttgaatcccagcactttttttacaagttgaggaaatttgttaacccatgcttcagctgcatctctaaaatgggaataaaaatagaaccgactttataatattgctgtaggttttcagtgagttaagtcatgtaaagtaaatagagtgactgccttgattaagccttaaaaacttaagctgtattattattttttattatttaaatttcctaattttctatttaaagttacatttcactggcttagagaaaagtgtaaacacatttcgtttatctaattccagcttcctgggatttgcatcaaactttgggaagaggcatgacttacacagggcctaagcattggtgctcttggaggacacggagcttgggggttgggcagattctctgtggtattgacgatccttgtcttattttcttctcattggagcaggaggcagggaaagaaatgcatggctcagcagcagcagcatgcatatttattgctgaaggtcttctcccagacattttggatttttttccatttgttaccttcacctagaaaatctttagtgtattaatctgcagagggcatctggtcctttgtctataccatgaaatctgttattctgtacctttatttcttctgagctaaggattggataacctcaaatatttttctctctctctttttattgccaagatctcccttccctaaggcaatggaagaagacatacaggagagaaggaactacaaataagagagatcaccttgaacaaaagttcgaaagtccatgaagctatatagtttttttctttttgaatttgttcatatgcttgatctgtgccaggaattgtcctgaaatttatgatataaagaaaaattaagcaaatcatttaattaaattgcgtactgtcacttggagaagatgggcaagcaaactaatgactataataattagagtggagtgtgatgagactcagagtatgtagatataaaacattccacaaaagaccatttgtagtagtgaccctctgtagggaaagatatgcattccaacattggttttacttgaagtgagttgataaaaatgaagcttaccagactgcatatgagcaaggcgggactttggaattggaaagggaatgtggggatagcactggagaagcaggatagggctgcagcaacactgatcgacagggaacactaaacaaggtggactgttttctgtgggtgaagtctgcgtgctttaacaaagtaagatacttcgtatcttaagaaaattagcactcgtaagtgggagtcgaacaatgagaacacatggacacaggaaggggaacatcacacaccggggcctgtcaggggcgtagggggaaaggagagggagaacagtaggacaaatacctaatgcacacggggcttaaaacctagatggcaggttgacaggtgcagcaaaccgccatggcacatgtaaacctatgtaacaagcttgcacattcagcacatgtatcccagaacttacagtaaaaattaaaaactaataatagtaaaataaaatacagctattaaaaaaaaagaaagaaaattagctcacctctctgaaactcagttttctcatctataaaataccatcactagcaaggatgctatgaggatgagggaggaggatgtcattcagattcccaaacctataatacgtagacggtagtttcaaggaaggatgtggattctattcgtttgccttggtaatggctaagtgatgtaaaattagaaatttctaaattcatccatacgtagcttctgacatctgcagaccacatcgaaaaggttatcacactaacggggtgccgagtggagtaattatttccagtcaaatatcttgaaaatacatatagaaagttaccaagactagaggagaaggtagtgggagcatgagggtaagactttaaaatacctggattcaactgagttcccaactaattattagacaatagtttcctccattgcagtcaacccttcctgatttttttctttttaaaagaagacatttaaaaaatctttttattggtgtagtcacttgcatgatggcctggtttgactgaggtgttagaatagggtaaggcaggattttaccttcctccaacccactgtaggtgatttgcaattcaatgagcaataaattatataattccaaatatggagtgtgtgtatgtgtgtattttaatggacatcttttggaaatgcccagaaaatctggaaaattatggcgccaaagatggcctgaatgaaagcattagtagaaattagtataaagtttttgcttagtcttgctttggctatgtgggctcttttttggtttcatatgaattttaggattgttttttctagttctgtgaagaatgatggtgatattgtgatgggaattgcattgaatttgtagattgcttttggcagcatggtcattttcacaatattgattctacccatccatgagcatgggatgtgtttccatttgtttgtgtcatctatgatttctttcagcagtgttttgtagttttccttgtagaggtctttcatctccttggttaggtatattcctaagtatttttttatttgtatttttttgtggctcttgtaaaaggggttgagttttttatttgattgtcagcttgattgctgttggtgtagagcagtgctactgatttgtgtacattaattttgtatcctgaaactttgctagattcatttatcagttctaggcattttttggatgcatttttagggttttctaggtatacaatcatattattggcaaacaacagttttacttcctctttgctaatgtgggtgccctttatttctttctcttgtctgattgctctggttaggacttcccatattttactgaatagaagtggtgagagtgggcatccttgtcttgttccagctctcagggggaatgctttcaacttttccccattcagtatgaagctggctgtaggtttgccatagatggcttttatgacttcgaggtatgtctcttctatgccagttttgttgaggtttatacttcccaaaagtatacctacaatgagaaagaaaattggtgggattatgtgaaaagattcaataagcattcacttgccatatgctattggaaaggcactagaggcggaagaaaatcacagttcacctaattaattatgatatagatatattgctactagttataatccaaggcataataattctacatgctaaatggagatcccatcatcattcatagaaaagtagagcaggtaacattatttcaggaaatcagggatagcttctggaggaattaggccttgaaagatgggaagagtttgttagaggaagacttgggagttcatcaggaaaaatatttaagctaatggaatggcaggaacaaaaagatgatgtgtgttgtgtacagggttctatttcggggagtgtgagcagaacagaatgcttggagttttggggaaaaggggagaaagggtgttctttattttttgttgtttaatctttcagtgatttcctatgaaagaactttaaaatgccagataccttctgcatttgaagaatgattttttttcacataagcagacaccattgtgtaaaacaaaatatagtaaacaaagccaaccaggctttaacgatggacaagcccgacttccgaagctacagtgccttgccactaaatatgagcctgacttgaagagtagttaacaaaatcattttttaaaaatgtgagttcatcttgtcttacctcacacagtttcttgatggtatcagttgctgcctaatttcctgagtcctaacctaagagtacctcctcctggttagggtctcaacttgccttcttagaatgaattcttttcactacattctcaccatggatcttctcttttcttaagtcatcagtaaagagattttctaccatatccactacattacagtatttggctgctctagatgaatatcttgggcagttggtccaggacttacaatcctctaccttgatcctttgggtagcctttctgtttggttcctctgtcttagacagatgggcaggagagggttcctcttctagtatcttcatgtcacaaggtgttatccatgacgggaagtgggggtgagttgtctttggcgtttctttagtggagtgcagctcagagcagtgtttcttaaaatatgtccatcattttgtgaagtggtattcgtcatgatgatattgcaatttaaattcagaagtgtgaataaaagcatggtattaaaacaatttatgaaccaaggcttcaatcattagtatgataactgcaaacacatatataaacacatggctgtttgccatgtaatccttctttcttttctttcatttctttctcttgagtagactttcccctattttattctaacccttccatctattaaccgtaaactcgtctgtgtgtcttttttttaaagagacagtgtcactctgttgcccaggctggagggcagtggcactatctaggctcactgcaacctcgacttcccaggctcaagccatcctcccacctcagccttcctggtagctgggactataagcacacaccaccatgcccggctgattttcgtattttttgtagaaatggagtttagttatgttgtccaggcaggtctcaaactcctgagctcaagtgattcgcctgcctcagcctcccaaagtgctaggattgcaggtgtgagccaccacgtccagctgtgtgccttcattgatactaatgtagattgaagctgaaaagataggaataaaaaaaaaacccagaacatgtggcagctattacaaagattgattaaattgatgttgttaaggggaaaaacccttaaatagcatctatgatagcattttagtgaccatggaaaatttaatattttttctgatagtggaccacttactcaagtgaatcctaaattatatacaaaaattacgtaacaaagacagccatgagttggaccctgttggataataatctagtgttttctagattccagaattgtagattcaagtgagtagaattggaatgtactttgatttgggggagttttctggaaacaattgtggatatcgtttttcaatattgaatgagttgccaccagaggtgtcatgttgcttggaatcatcaataactcagaagtgacagagaacagcctgggtatgctctgaaagacatatagatgtcacatgttgagagcttaaccagatggcatttttactcatgcaataaatacatattgagtgtccacaaaatgtcagactctgtgatagggtggagcaatgaaagagtgagaaaaagaaacaactacccttcagtcctgggatttgagattttttcccatcctaggaatctaggaatctacaaatatgaccttcagttttacacagaagcttctttttttaattgttaaatggggctcagttgcactactttacagcctaattttaaaaattagataaaaggatatgtgggctgggcacagtagctcacgcctgtaatcccagcactttgggaggccaaggtgggcggatcacttaaggccaggagtttgagaccagcctggccaacatgggaaaaccctgtctctactaaaaatacaaaaattagctgggcatggtggccgtgcctgtaatcccagctacttggggggctgagacaggagaatcacttaaacctgggaggcagaggctgcagtgagccgagattgtgccattgcactccagcctgggagacagagcaagactctgtctcaaaaaaaaaaaacaaaaaaaaaaaaaaaaagaaaagaaaaggatatgtgtagaagtgcccagtgacaaaatgcaagaattttagaaagttgataaaacatgagaagatcctgggagacacatgtgaatctcaagagcaggaactctagtgtattcacctgtacacagttactatcactagtgacagaaacaatagagaagtattttctttctgaatgaagaattcttctctataatggtaattcctattaaatcctttaatcggtaattgcaaaaatggaataagatttcagtctaatgctccaagatgtttgcactgcaaaattctacccattatttagtcaaaatccatctctgaggagcagcctaagcaaatgatctctccttaacctcagttgaaaccttgtcatgctatttcactttgcttagcagagtgctcatcttgagtttgctgtataccaatatgggggtgcagtctccatggctgcctgcttctccccatcctttgatacaaatcaacattcttgtttagagaatgataagagattattaaattcaggtatcagcagtggagttttggggaagaaaaataaagagatcatgctctgtaacacagccctgagaaaggagactggggctgtgtgctttctagaaaagtggttttccctcctgcatgactgatggcctgtctggtgtgaggctgaccatggtaataatgtcgtgacctactctccacagtggaaaaagctgtcggttctgatgtgatggaggttgggtgtgggagattgggattacagaactgcagtggccacagatagactcctgatttagtcacataaaacaggatgattttgtgtaaaactgacatttagtttattttacatatatggaaggaagactaggaagaacataaaacaattagcaggaattacttctaagagatattgagggaagtatcaatttcttttgattaatatgattttttacattccactttttatttgtgaagatgtataaatctaaaattaaatatacatgcccacaaaaataaaattatgtatttagtgacttagcgtaatttcataaagggagcatgaagtttagaatcagccctgcaattaacatcctaaattttgcactaaggataaaatgcttgaaaaaggatgaagtgataatatccctttctttttaggacagacattctaggattgaacacagctcctggaaaggagcttttctgcctcgctcaccaggagtgtgctcacactcttgacagttccctgtgctcctttcccactgtgggatttaaggccaaagagattggatctggctgccacactccttcctgctgccatattctcttagtgaccatcaaatgtcacgtcccttgttgacacagcactatgctctggaagcctttgttgaaccctattccgctgtcctttgacccttttactttttgaaatgtatatattctgtggatcccatgttttgttttctagcctgcagcttccctcagcaactacagccagagccagccccattcccttctcccctcctaatcagaactcttaaagtctactccagtctttcttagcttgcctgttttgctgtaataaactgggacatgcagggcaaagtctcaacacaggacatctcagcatcttgtccatactcttatctcggagcaagaacacacggacccactgttgatacctgagacaattatatttctttacaatgattttagaaactactagagcatgatgagctcaggtgttatggttagcaaatgtggaagactcaacttgccttcctcacaaaacctatttgctcttctcagttgcaatggactacctctacctggagtgtcaccagtgaaaaagttacttgacagggatctgtgggtggaatctacagagtgacagatttcagttcagttattaagataaagcatttataactgacatgttttgtaattgagtgggtggtttgctccacattcctatggcaagtatttcccagagcaggtaccttatatcggtagtcccactgggggctccatgacaacgcagctgttttcatcaagttggaaacgctgtcactgaattactgcccatggactctccacatacctaggagggaattgggggattcttgcagcagagaagcccatttaacttcaaggcagtagtctaacttttttttttttttttttttttgagacggagtctcgctctgtcgcccaggctggagtgcagtgacacgatctcggctcactgcaagctccgcctccccggttcatgccattctcctgcctcagcctcccgagtagctgggactacaggcgcccgccaccacgcccagctaattttttgtatcttttggtagagacggggtttcaccgtgttaaccaggatggtctcaatttcctgacctcgtgatccgcctacctcggcctcccaaagtgctgggattacaggtatgatccaccgcacccggccagtagtctaactttttaaaacacagatcaatattttcctggaacatgcttttccatatcccatagaccagggtttaaatgatcacacttgggacccttgtatgatcagaatcatctcgctccgttacttttagcacagggctgatgcttaaacccacattgtgtcgctttgtcccagggctgcattgcagtgagttcctgttcataggctgggtgacaagttaaaggtggcatcctgagattggaatcaaggcaacgatgttttcgcttgctctgttgcagcctgcccacctcgggggaatgtcagcagcccctttttgtcagcatataaacaagaggttttgaattgttcagtcatagagaattgtgaatgcgttagaaacacccaggccttaaacttcggttagtggttagataagaagaaaaagttcaagggaactattgtacaatgcggcaactatagttaataacaatgtatttgctaacagaatacattttaaatgttctcaccgcataaagataagtatgtgaatgcgtatgttaattaacctgatttagccattccacaatgtatacgtattccaaaatatctggttttacagcataaatttatagaatttttgttaattaaaaaatgtgggcttcaaatttccaagtgttttccaggaatttttggtgttaaaaaaaaacattcattttgtcttgctagacaggtacctagtcctaaaatcttaagaatgtttcagctctgcagcagagctgctggcatttattaagtatgttgctagttgtaagatcatttggttcaatgttgggcatattttcagactcaacaatttatattttgcttgctgtatgtgcaagcaaataacttcaactaggccagcctcgttgtgaagaaatttccccggtaaccaatgaagaaatattaatgatttgccagttggtctcctcggagacagataacagttgtcttcctttgtctgccccgctacctagcttatatttggcacttcatcaataaactaggggtgagaaagtaaataagtggtgcttctactctgcctgaggatacttgaaagcaacttgttctcttaagtggattaaataattcctccctgaagatctcattacttgataattttgtaaaaattagctttttctttataggaagggggtaagtaaactttgagtataactggtagctaagagccaagccggcctaggctccatcatgttcccagcacttatgggcaatctggtttagagaaagttagttcccctctccgtgcttccgtttcttaccagtaaaatgaacattacaacaatcttataaattgctgtgagataatatttaaagcagttcctggtacgcagtaagtgctcagtaaatgttacccactactgtataatccaaaggtgggagtgttccaaaacaaatgctaattttacaaataaaaattttggagtgttaaaaggaaggaagttatatgttcaaacatatgtatgtcatagataaaatcaaactgtttttgcttaaactatgtgcctcttcttccaccctaatatctgtgcagtacttgacacatagtttgctgagtgaatgaatgaactattaattaattaatcttcacctgtatcgcttgatgttttcctgcaggcgtgaatatccctgggcatactgcttgctttgagaaatagccagtgaagggttatgagaaatagtgcgatttatgatctgtgtatgactcaaatgacaaaattaattgcttttttgtcatctgttcttcatggattttcattaattcttccatatgaaccaaatcctgtcttaaaccctgcagtaatgatcacggtgtttaacattttaataaaacgatggaagcatgtatgtgtgtgtgtctgtgtgtgtgtgtgtgtattcatgacaaagaaagtgagagagagagaaagaaagagaaaaataatttacatgagagttaactttttatttgtatgtccagtggtgtcagttgccatgaataagctattataaaaaattaataaataatttcccattaaaatacaaaaatataaatgccatcttccttgagagtatttctgaaagttaaaaactctaataattggataacttttctgttatgttaaaagaggacagtttttctttcccttaagaagattcctacttatcctattcagtgtttgaataatttccaaattttgatttctgtctctgctactggtcataaacatattgaggtttcaaaacattcagattggccctccattaatcaaacatgccactcatttcttagcacaatctacagattcacaaagcccgatgctccatatcccttgtcacatccggaggcagagcattgaagttcatggaagaaggaagaaagccatgcctgagttgcacctgccagcaaaacagatgacaggcagccaattctgagccatctcagctgcaccggaaagttcttgttcaaacaggctgtatctaaagactttctaattaccctctcatgtcatggaacacctgtggtccactgtttgagatcctctgctccctgatttctgtacacttgcctctcctggtttccttcctgcaacctcctcttctgtctatatgaaaaagtttagtttttattcccagctgttcacaaatattatttttagtgtaatgataggtaatccttattttaaatgtcacaactctagtctctctccaatgtcctaggtaccacagtcaggaagcttcctatttgcataagaatgaaaacatggtcttgaggcaggataagtaaggttaggacccatacttacttgtcctgtgtgtaaagctcagtgggccacttttatagctggctctttccccttgcaccctcaggcatcaacacctaactcttttgcaagataagcggtcctaccgaataccaacagactgttagatggttacaagttcctgatactcagtatgggcttggggaagagaacaaaagtctgttattcctgatgtaacttccccagcaccaaaagcacaagaaactattagctacaaatttctgcctgctgggcactgagagaggggcagagactcctccagtgtcccacaggcatagctagactcaaggtttagcttatagtaatatttttctcattttaatatcaaaaaacaccccttagatggagattttatatgctaatgatacatatgatatgtgttagagcatgtagatcctgagtgtatgtactaaccacagatccacctttacatacttgacctcaccagtattttatgaatatgtctgtacagtttccgtaaaggaaattcccttcaagaccctaggggctatctctgtctttgagcagcccactctgcctctcagattttgagagctaatcccaagtaagagtagacaaacaagtttgttgcacctcactttgcaatactttcgctttgatataaacttctttgtctacacttacttgggattcgctctcaaaaccttttgtgcagagaagtcaacgacctgaacaaggctactgacaatagtcttgccaaattttctacaaactccattcttctttatttttattttattttattttactttaagttctgggatacatgtgcagaacatgcaggtttgttacataggtatacatgtaccatggtggtttgctgcacctatcaacctgtcatgtaggttttaagccccacatgcattacgtatttgtcctaatgctctccctccctttgccccttaccccccaacaggccccagtgtgtgatgttcgcctccctgtgttcatgtgttctcattgttcaactcccacttatgagtgagaacatgtggtgttcagttttctcttcctgtgttagtttgctgagaatgatggcttccagtttcatctatgtccctgcaaaggatatgatctcattcttttttatgactgcatagtattctatggtgtatatgtgccacattttctttatccagtctatcattgatggatatttgggttggttccaagtctttgctattgtaaatagtgatgaaatgaacatacatttgcatgtgtctttatagcagaatgatttataatcctttgggtatatacccagtaatgggattgctgggtcaaatggtatttctcgttctagatccttgaggaatcgccacactgccttctacaatggttgaactaattacactcccaacaacaatgtaaaagtgttcctatttctccacgtcctctccagcatctgtcgtttcttgacttttaatgatcgccatcctaactggcgtgagatggtatctcattgtggttttgatttgcatttctctaatgaccagtgatgatgagctttttttcatatgttttttggtggcataaatgtcttcttttgagaagtctatttatatcctttgcccactctttgatggggttgtacaaactttattctttgtattgcacattctctccctcctaggagcaagtttatgggtccatggcctcttcatccagtgcacattttctgcttttccattatagcacttattacaaagaatgaccatagctttttctccatggtctctcattcatttctgagctacctgagaacaagaatcctttctttacatgaaagtgtgcctgatatctatcaccatgtgtatgatgaccacagagtaagcagtcaagaaatgccagggaaataaatgaatgcatctactttttagaaacattgtcaccatctttctttatgtaattaaatgtgaacggttcataaggcaaattgataaggatagaaagtagattagaagttaccaagggctgggaggagggatgaatgaggaattatggattagggggcacagagtttctgattggggtgatggaagaatttggaaaaaaggggtggtggttgtacaacgttgtgaatgtatcaagttaacaaaagtaatggcaaaaaccacaattacttttgcaccaacttaataattaatgacactgagtcatgcacttaagcatggttttaatgataaattttatactatgtatatatatatttttttccaaataaattttttaatgacctatttacaaacacaaaaggcattgaaatctgggtaactagatgcatgttttctaaaaggaaaagcttatttgctaaataaagaattcataaaaggaagctcagcaattagtcttggaaacaattacaatggtagcaatagttttttcccttattctcacttcagacaaatattatggcaacagaaaaaaatgttaattaatgcaatgaattttaaaagtgaatgagtgaataactgaatgattaaaaaaagaaccatttaaatagaggaacatctgaggttgaatacttgggtccagcccagtacagttcattgctctgctgatcaggcagatgttagctggtcaggatggtttgcattctatatgcacgtagaacagacatggacacacatatttgtgtttggtaggatgggctgtcaattcgaatagtcatggggcttaacggtcagatcaaccaaattggtgccctggaagtgtctcagattttgtaacctatgtaagagttttaatctcactgaagcacagttttctcatctaaaaagtgaaagagagagagaaaaaagtccaacatcattgctttttttgtggaggtaaagtacacctgattagggcctggcatgcagaaattccttgcttattcacttttatttttattatagaggttcaaataaattcatgttgaacaaatagttattccacataaaatattatgcattctgaaaagaatattagtgccagatgttcatggtataacaatttttctttttctttcttagctaaatttatacttagcattcttcatgatgtatgcaatattagttcatctaaaatctaagctatagctcagaggctttgggggaaatactcatcagtgttcagagtaactctactgttggtgatctgtaatgtatcttttctaagcaaacataggggttaaaattgaggctgtgccttgccttggagggttagtcttatgagcactgatttccatgtatagagctttttctaacctttttctctttttctcttccccttccttccatgctgactttggtgtagcagaccacttggggattgaattcatgggtaagactaaacaatttgctcatttaatatcctggaaatgctaagctttatgatgtacatagtgctttccttctccatctggttataattgaaatgtctcattatcagatgctattagtaggaaaaaatactcttgtcgagttttcactaagtaatggctcaaaatgaaataattaactacttattggaaaggcaatttaatgttaaatgcagtgtctggaatcatacagaagttgtatttggctcctggctttgattatttcctctaattctcaattttcatatctgtaaaatagggataataataggttctattttcctgcacatgtaaattgcttagcataacgtctgcaacatggcaaacactcaataaaggataaaaagcaatggtttttaaatgtcagtttttaaatttttacttctaagtccccttccttttgtgagatgattcctttggatacattttggtatcaattttagtttggagtgtgggctattaaacatttttattcacaaaattaaaatgtttcctttaaagtatttgcagtgaatggtgtatgtttcaaagcattagaatgccttccatgggcattgtttttatagtcacagataactgcattcaaaattagacctaattctctgagtcgatggttatacattaaatgaagaaagaacatttcataaagttcaatatgcatcgtagtacatggatggaaagacactcaggatttagagttagggaaattgagaagatctaaatttgaatcaaaattcatctgcttctttggattctattaaattcagatttttttctcttgtataatgtggatatgaatacttgctttatacatgaatgtttattgtgaaataattatatacttacttgtattaatttatccattcacccattaattcagcaaacacttatcaaagtgttgatttgggatagctttgacatatttgagagacgttaagttggtggttgtattgttggaagtgttgagagttaattagaaatttgtgaaatgtctttataccggaattggtgttcccagttgtatggtattactcattattgctccattctctggttattacatcatagaaaaggcagacagctcaattcctgcaggcttgcggttttgttggatagatgtgatgaaaactcagaaaaccaatgagatttaggatgttattcaaatgaagcgcgatggaatgtgagatagttgtagaaggaagtgaaagaagaatgaccgtttcaatgaaatcaattagtagtcatcatgagagcgcttgaacaagctggtgtgatgaagagattatagtcatatggcagattggttgattttgattttgaagatggaggagttataggagatgacaatattcaaagcattcctatgagtgtaaataaccaaactgaggttgagggggaaataatttgaaactagaggtcaaggacttgagaggacatagttttggataagttgtctaatggatattccagttactcatgataatgctagggttgggacagagagaaaaaaaatgttggttatatgccaaagtttcccattaatatgataaactatactggaatttagtagatgacaaggaagagtatagttaagggtaatgccagctgcatcaaaaaatagagcccacgttattataatggctcaaagacggtagcaatttatttcctgatactactttttcttgtccaaggtagatgtatttcctgtttaaggtagcaaatgactagttttattcaagtagtgaattagagatccaggcttcttccatcttttggtttcaatattacgtaggtttctttgttaactgcatctagccagcagattgagaaacagaacagagctgatgcatacccaatgcttaaaagactgatctacaagaactcatatcactttttgcttaatgttctattagctagagctaaattacatgacttcattttgctgtaaaagaggctgggaaatggaaccctgagagaacagaggaaatgcatttttagaaatctctgccactgtgtgaatggcataaactttaaaggaacaggatttttcataagagacaagagaaactgtacgttagaagccaggaggacagatctccaatgttgaaagtgagaaaataaaaacagctcttgagacaggtagaggaaaatgagacttttcaggcaagattcaagtttcagctaaaataggagaacaaaaataaagagtcaaagaagagattgagaatgcagaaggtgtgttgcggaatgtggatgagcaatttcactaagccaagtggagggtataactggtggaagaggagtagatagctgagtcatgggccacaaattactgaaaatcatgggcatatttttgcagtaagaatacattgttgagaagggcacacaatttgtaccctcctcattcgctaatgatggcagtgattcgtagcatggaggtgtgagcatcagtactcattttgaataaaatgtgccctgggccgcttgtccaagagcaatttgccccactagtctgtggtgattgcaggctcagtgaggctttataagttgttcagcagaatgccctcaaatgcaggaaacactgcatagttggtggtgggactaggataggtctagatccccagtgtagccatggctgtagcaaactaaaattgccatgcaaattttaatccgtgttgaaagaaatggaccagtctccatcctgttgtgcttcctattgtgtctgaggactgccagtggcactggtaatttatagagttataatttgctatagatgcaatctatgtattaagagctctgttttggaattcatttaaagaaatgtagctactgacacaggaaaaaatagtagattgtcatgtagttcatctacatgaaccacaagactaaggtaatagtgagttttgcaaaagatagattctaatcatagctataagacctcatggggaatgaattctcagtgggtgactatttgactccaacggtagaaattttcttggagggaaggggttggggaacaactcagagttcaagggattggctggtatgcatatagataatggcagctaaaaaaggattgtttgcagtagtgaatagctttataaatttagtgaatatgctgttttcactgacctcaataattcacccccacagattgttctaattgaatatgtaaaattctgtttgttgctttgagaacaatattctcagatttaacttttttatttttattttttgagatggagtctcactgtattgcccaggctggagtgcagtagcacaatcttggctcattgcaacctccgcctcccaagttcaagagattctcctgcctcagcctcccaagtagctgagattacaggcgcctgccaccacgctcaactaatttttgtatttttagtagaaacgggtttcaccatgttggccaggctgttctctaactcctgacctcaagtgatctgccctcctcagcctcccaaagtgctgggattacagacgtgagccaccacacccggctagatttaatttatgattatagaatccatatgggtaaaattccttccactgaaagtgccatcatcccaagtaatatgacatctctaggtatgaattcagctgggaaggggaaatgtaggcatagtctatatgtaagtttaataatgtcagtttattgttgtgccaacaattaatcaatgctagttctatttgtgtgtgtgtgtgtcaatttctttaatagacttgattttcacacagttttaagttcatagcaaaattgagtgcaaattacagagatttctcacgtatcttctgtcttcaaacatgcacagctacctccctaatgaagatctcctacaatagaggtacatttgttacaattgacaaacctaaacctacattgactcatcattatcattcaaagtccaaagtttacattatggttcattcttgatgctatactttctatagattcagacaaacatattatgatatgtatccattattatattatcctacagagtaggtttactgccctaaaaatcatttgtgttctttctagtcatccttgcctttccccaaccactggtcttttttatttattttattttattttattttattttattttattttattttattttattttattttgagacagagtttcgctctgtcacccaggctggagtgcagtggtgccatctcggctcactgcaagctccgcctcaggggttcacgccattctcctgcctcagcctcccgagtagctgggactacaggcacccatcaccatgcccggctaatttttcgtatttttagtagagacggggttttcaccgtgttagcccggatggtctcgatctcctgaccttgtgatctgcccgcctcggcctcccaaagtgctaggattacaggcgtgagccaccacacctggccccactggtctttttactattgtcatagttttaacttttctagactgtcatatatttgaaataataccttttgtactggcttatttcacttagtaattttctcatgtgttttcattgcttaatagctaattttttgtatttttagtagagacggggtttcaccgtgttagccaggatggtctcgatctcctgacctcgtgatctgcccgcctcagcctcccaaagtgctaggattacaggcgtgagccaccacgcctggccccactagtctttttactattgtcatagttttaacttttctagactgtcatatatttggaataataccttttgtactggcttatttcacttagtaattttctcatgtgttttcattgcttaatagcccatttctttctagagctggataacattacattgtcaccttttgaaggacatcttagttgtttccaacttttgacaattatggatataattgttgtaagcatctttgtgcaggcttttgtatagaaataaattttcaactttttggtgtaagtaccaaaaagcatgactgctgggtcatatgggaaggatatgtttagtttttttagaaactgccgaactgaattccaaggtggctgtgccattttgcattcccaccagcaatgaatgagagttcctgttgctccacatggtctccatcatttggtgttgacagggttctggatttgggtcatttcaataggtatgtaatggtaactcactgtttcaatttggacttcactaatgacacttaatgtggagtattttttcatatgcttatttgccatctgcatattttctttagtaaggtgtctgccaaggtctttggcccattttttaatcagtttgttttcttattgttaagaattctttgtatttttgaaaaatgatcctttattagatatatcttttgcaaatattttctgtcattctgcggcttttccctttattctcttgacagtatgctttgcaaagcagaaattttcaattttaataaagtccagattataaaatcttccttttatgtattgtgcctttaacactgtatccaaaaagggattgccaaatctagtttatctaaatactctcatatgtgatctgctaggagtgttatagttttgcattttgcatttaggtctgtggtttattttgagttaatttttgtgaagagtgtaaggtctgtgtctaggtgcatgttttattgaatgtggatgtcaagttgttccagcaccatttgttgaaaagtttatcttttctccattgtattgtcttttctcctttgtcaaagatcagctgactatattaatgtgtatctattctgagttctttgttctgttccattaaactatttgtcttttttttttttgccaatactatactattttgattactatagctttataataagtattgaagtaaagtggggtccgtctttcaactttgtcttttaatgttgtgttgacttttctggatctactgcctctccctataaatgttagaatcagtttatgaagatacacaatgtaacttcctggaatttttattggaattgcattaaatctataaatgaagttgaaaagagctgacatcttgacaatattgagtattcctattcacgaacatggaatatctcttcacttacttgggttttattttttaagtctttcattagtgttttatcattttatttgtatacatcttttattttgctagacttatacctagatatttcattttgggggatgctaatgtaaatgctattgtgtttttaatttcatatcatatttgtttattactggcatctaggaaaattattgactttacatgttaacctagtatcctgttacattgatataatcatttatttgttataggaatatttttaatttttaatttttgttaacctaagcaatcaggtcatctgcaaagacagttttacctcttccctttccaatctgtgtacattttgtttccttttcttatcttatttaattcgctacaacttccagtatgatgttgaaaaagaacaatgaaagggggcaactttgcctcgttcataatcttaatgagaaagctacaagtttcttatcattaaaaattatattaggtatagatattttgtagatattcttcatcaagttgagaaagtccacctctatttctagttaactgagagtttttaccataaatgggtgttggattttgtcaaatgctttctttaaatctattgatatgatcgtgtgatttttttagtctcttgatgtgatggattacattaattattaatattgaaccaactttgcatacctgagataaatggataaatgtcacttggttgtgttttccattgttctattttaattagttacataatacattttttctcttacttttattattcttgctttgagcaatatgactttcatttattcttgaagaacacagggtcacaaggaggtaatgatctgaagcacacgtcttcttcccaaatctttatactctcaatgaccagctctattagtgagcttactgatcagtctcaaaaccagaatacttcatacagtttaacaaattcctgttttatagcaggaaactccaagtcatatgctgcaagagttctatatttaattgacatacatttgtcacatttactatatgccagatgtataagatgttggatatgcagatatataatacatatctctggatgtccaaaacctctaaaactaaaaagagaaagctacacataagtgaggtgacataataagtgctctaaaaaaagtttaggcaagatacgatatgaaaaaaaaaaagaaagcaattgaatgggcttggaaagttcaggaacagctttccaggaaaggggacacttaagctgagtatcagccaaagtggataagctatacttagtaatgccatagtgcaaatctataccggccccatattgctcccacattaaagcaagacttgctatttcagtctttcttcctgtatctatcagcttccgagagtcaccactttaggaccggaaagaggataacaacttcagtaaaaacaagtaaccaaaaaggtttttgagtagatttattaattttaaggagtgattatcccattgaggaagccatgccaaacctaatgtctgtaaaactgtcaacattcaacatgatttttcatttatattcccgaatttttcttaatgatgctcctgggattggtaccatggaaatttcaacagcaaatactgatctgcaatacggtgtcagttaaaaaataaagttaactgacataattagagcagaaatttggaaatgcacacagaagcagaattgtgtttgtgaagtttttgaaacaaagagagttgatagaaaatcagtaaccaaaaatatatatcttaaattcatgtcttaacctcattcattcattcatgcatgagggaaaatatagatttttacagtcagatgtttgaaatttccttaacagtttgaatagatcaagagatataattgacagacttcttcataagcctaaatattcatgagtgatgtgagaaacaaccaatcatttagtttaggcagttggccaaagggcatgtcagactggccattttggaaggtgcaataatcacgaaggatttcttatctaacaaatatctagctactgtgtgtgaaatgtatctcattaggtccttttgagctatttgttaagtggttatttttctaacaatgtcttgatgcatttgatgttccaggcatcaaagatgtttatatgaaagcaggtgcaatgccatttgaaaatgtattagcaagggacaagtagagttgaagattatgtggaagatctttaatgcaaatttccttcattctcatcgggtaaacgaaatgaatgctgtcagttaaatattttgtcggtgatttgacattgtttttaggatagcataatatatttatgcaaagtattgtttgagcaaattctggtgtaattttttaaatcaaaagatgtatagaacatagaaaaataagattcttaattaaaatcttaaaaagttattataagataatctttgtattttttaagttaaaaaaaaaaagaaacagtgttttccatatggaaggcatagaaatgtgttgtactcaacgtctgtgatataaattatatttataggtttagaattgatagaatattacttcaaacttgatcgtatattgggtattctttcatcctcttgtgtaaagaaaataggctttagtgtattttagtgagcactggggataatctcctaagaagtgaccagtttaggatcctgtttagatgataggaagtgggcttttttcttcttagagctaccctgcatattgtaaatgacttggtgtttttcctttaaatctaacaggctcatatgtcagccaaatgaattcatatttctgttctagtttgtgaactggcgttagagatagaactgaggattcttttttcctaagctgaagtctctgaagtagacttatttggaaaaaaaaaaaaaagcattttcattcatttgaatatattatatttctgtatagaataaaatggtaatttatggatatatatgcatagatgtgtgtttgtggaggagtgccattaaaagagtttagttttgctagtgtgccctttgccatgttaaactacgtgagaaatcagatatagtggaaaaacaaaagttacatgatcctttaagctctcaaaatgagtgaatgaagtagtaactatttatatcgctatcttacaaatgacaaaacctgactactaattagctgaattatctttctaaagagcaacaaagtagcagataggagttgaattcaaatctgtctttctccagagctcttgaattatttaggtgactaatggatgagcaatagggctccatgtttcctcaaagaggttgtactcttgcagtgtttcaaatggcaaagcagttctgtgactagtccttagttttgaaggtaatgttttctgaatcccttcatgtcataaggatcttggccagtaactcacaattatccaagctacaagcaaatgaaatatgaaccagatcctgtttatagctatatattcagaattataactgccaacagtataaaaaggaccacttagctggtcattgtattctctcacatggggtaatctacagaagttgtattgtattgaaggttttgtggtgagtacagactgtgttgaatgaagtcatttgggtggttctactgtacatgccattggggtataaaggccttactcatttatctcctctgatagaaaacatttgccaaattaaatcatgatttgaaccatctctccactggctcctaaagattctattggagaagtatttaatacttacacaatattgttttctcatttattttattttaaggaatatgaccactctctttctattttttatttttcaaggcagggtcttgctctatcaaacaggctggagtgcagtggtgtaatcgtggctcattgcagtcttgacctcccaggctcaagtcttcttcccattttaacctcccctgtagctgggaccagaggcatgtggcaccatgtgcagctaattttttatttttttgtagagatgaggcttctctatgttgccaaggctggtatcaaactcctgtgctcaagagattttcctacttcagtctctcaaagtggtaggattacaggcgtgagccaacgtgcctggcccactctctccctttacactttgattttctgttggtttattttaacatgggcttcagtacatgcgctgttaatcacaagccctccaagtattttgttttaacaaagttatctttatttgacatggacattccaaagactcccaagccatacatataaggataatattttggcttaattattaagagtagtcattaacacatattggtacctcctattgggagaagtaaaagtgtttacacaaagtcatgacaactaagtcaaataaattcaattctgagataattttcgggtgagattaatagtgttcagtgatctttgaaaatgatacaaccaaaagatgtattgaagaagtatgcagatctattaatcatgatttctacaaagaagaacatgagtatttctgtaaagatgtttttggacaagattttaaaatcagctaataaaatttgattggtagacactgaggaaagtattgaactattggcaaaagcagtgctgttcactgaagaataacataagaccaatacatctttgctagattaatagtataatattttccgtaaagttgttaaataactagattggaagtttctacgtaggtgtgaatatatggactttagcaaaatcttgggcagaatttcatgaatttcttatgtaatatggtgaaacattaattatgtagtaattatatagtgatagatagatttggggcaatgaattctagttgaaggatcaagaccagccatgagcagagcttctagtttcttctaaggaaacatttttatgaattgaaataagggtatagcttgaacatttaccaaattattgaactttttgtaaaaagtgaatgcttctttgtcagagagcaagtctaacaaaaagcattggacattggacttatcaaatcagacacagaataatctgatcttttagtcagtatcaagttgattacttacatatgccaaatatctcaactgcacgtgagttggtagtaggttctgaaaatctgggatgtgctaaaataaagggaaataaagagcaacagtgatgttcagattgtacttagaaagtaattctcagagagagccaggcatggtggctcacgcctgtagtcccagcagttgggaggccgaggcaggtggatcgcttgaggtcatgagttcaagaccagcctgaccaagatggatgaaaccccgtctctaataaaaatacaaaattagccaggtgtggtggtgcatgcctgtaatcccagctacttgggaggctgcggcaggagaatctcttgaaccctggaggcagaggttgcattgagccaagattgtgccactgcattccagcctgggcaacaaaagtgaaactctgccaagaaaaaaaaaaaaaaagaaagaaagtaattctcagagttatcagagaagttaaaaaattgttttttatatccaattctgccttacagttgcttcaggagctaggataagtcagcttaatagaaaggggaagaaaggacaatgatggaacatctgcagatgcagcaaagtgaagatgatacaggttcttctcaataagcagagtctgtctgctttgtgggctcatgatggttcagccagtcagaatgtgttgagcccctgtgagagctcaggccttgtaccaggccagctacaataagtcaaatgagacagactctcaagaagttcacagttcagtgcatagggcagactttttttttttttttttttttttttgaggcagaatttctctcttgttgcccaggctggagtgcaatggtgcaatcttggctcactgcaacctctgcctcccaggttcaagcaattctgcagcctcctgagtagctgggattacaggtgcctgccaccacacccggctttttttttttttttttttttttggatttttagtggagacagagtttcaccatgttggccaggctggtcttgaactcctgacctcaggtgatccacgtgcctcagcctcccaaagtgctgggattacaggcatgagccacagtgcccagccacatgggacagacttttaaaccaattattgcaattcttgcaaaaaagacttaaattgaagttttgttttgttttacaaaaggtcagatgaagatgtcccaaacatatacaggatattaatatatgtttgacacacatgaacataaataggagttgagttcacatacatgtggaaaacattaggttctgtacctctactgcatagcttcacaaagtcttaggtgtattctattcatctgtgaatcttggagagaaatctattgtaggcaaccttttttgaactatttgtccaaaggagcatatatgctagagctacggtttagggtaaatcctgggataaagggagacagaggaaggagcacccacatacatcagaatagttcgggccatttttaagtgaaagaataaaaaattatatttctacagttagtagctggagaaaggaaatatgagagagagggaaaaggaagaataaagggaaataagagatggaagagcacatttgggaaatggcaaggagtcccagaactggacaaacttgatgtagttggtgaaggggccagagcagattatgaccaccctatctgccctttgaaataagtataatcttatctcttgttgaagaagaaaaccttctgaggtttcaagcagggaagtgatgagattttcttaaacagcttactctgtcagtagctgtgtgcagagtttgcctgaaggcactgatcgcagaatcctagctaatggaacaaacttgggattttacttcaaatattcaccaaatgctagccctttaagcaaccctgtggacattagaaggataaattttcatttagtctgtgccagattcagagaaagcggcaagtgcagaatgcctggggaggcagtgagatgagttgcaaagtggaccttgaactggtcttcgaggaaagagcacttgatttttatgggcagcgatggaaacatcctaatgaagatgtcagcgtaaacaggacgaggatgaggcaatctgtttggaaatactggctctcatcagcaaagggaatcacattataatttaatttggattacatataactttttccttaaaacatccataaaagcataccattcccctgcatgaaactttttaatggatttagaatgaaatctaggcactatctgctgccatgccaagtcctccatgatttggctctgcctggcaccctgaccactcctaccacgttattattctcatttctctacctaccccagggcctttgtcctgcctttccctcagcactagctattgtacttatctgcacgtggttgattccttctcataataaataattcaattaaatacattctgtaagagacttagcctctctattttatgtacttcctattttattcatattaacttcttttgtttctccactgcatttattaaaatctaactaatttatgtgttcacctttttctcatcagcctcttcactagaaaataagttctgtgatagtagaacttgcttgttgtggatctccagcccaatgcttagcataattataaaagctcaatgaatacttatggaaataacacttttaaaaataaatgtaaatagtatatgtttttcttaactcttaagttgcttaaatgtctaaaacgtataagcaaacccacccatgaaacacaagaccatgcaatttagttctagattaattctcaatcagcgatcttctttcttgagatttcctctgcttaagcagtagcatataaaaaatggtattaatctaatgaagactttttttttttttttttttttttgagacggagtctccctctgtcgcccaggctggagtgcagtggcgcgatctcggctcactgcaagctccacctcccggcttcacgccattctcctgcctcagcctctggagtaggtgggactacaggcgcccgccaccacacccggctaatttttttcgtattttttagtagagatgggggtttcaccgtgttagccaggatggtctcgatctcctgacctcatgatccgccctcctcggcctcccaaagtgctgggattacaggtataagccaccatgcccggcctaatgaagactttttaaagttgaagtttccagttcacttagtagtactgagggttaaaggtgttaaatattaatgtttccaacaggattggaacacagcttagggaagtcaagtaaatttgcttatccagtgaggtcgcctgtcttcatgttgcattcactcttctaagaaggatttcatccctttttttttttttttttttttttgcatgagaattgaagcagaagcttgtgctgtattgaaagtatattgaatatgggctccgtttattgatgaagctttcaagcactcaccagttaggaggcatagaggaaagagaatgaatgttcactattatataagttatgggcatggtaggtgacttcacaggagttatcacattttgtcttttgaagttaccagggatcttaaatatgtgatgtatgaaatcgccataacctgagtgacctaatctttggtttggggaaaactgctcctgtcttcattttagtatccttgggaataccagatttggggagctacctagtatgtattcaagaaagctgtccatatttagagtgcgcacgagtgagactgccattcgtggaagagaaagacatagagcttcagggcacagaaagttagtcttttaaaaaagcctcttaagggaatttttttccactatatatgtgaagaaataaggctgatgaaagtaaaagtaatatgcccaactgataaatagtaaagatgaataataatccagatcaaaatgtctctaaagcttgaactattcccataatccttccctaggagcataatataaaatggtgtgttttctccaaatatgatgatatcctactttgtgctgggctccaagcacactgggccagggccataactacactcaactaggccctcagctgtagaaggtatatcatgggtaggctggccagatttagtcaataaaaatgcaggacacccacataaatttaaatttcagagatgtaacaaatacttttttaggctagatatgttttgtgtattgcatgaggtgtatctataaacatcgtatttgttgtttacttgtaaagccatttttgagtattttatctggcaacccctgctgtagggccatgagcacagtaaggagtggctccccagtgacccacttctatctcacactccagttcccaggaaggctgaattagagttaatatgagcagtgcaggaagataagcagaattaatgaggaaacttagcaaaaggggttggaataagagtgtgctttgtgtcccaagggacagctctgcttgttacacgatgagaattatgcacaaaatactaaactgttcccaaattacctcagcaactatggttgtttaacaaggcaaacacaacctgcaagctcattggttctgggcaggatggatcctgctgtcagagcaactgatgaactattttaaagccaagttcctattgtgagtgaaatagattaacacttcagatatggatgcttcaaaaaacaaatagcagcatgctaacttagttaatgagtttttgaggaagaaagtagcatttaacttaccaaaagatgcagttcaaggctatattaatgaagtaataacagctgtgtctttatctgttcactacccattcattttctcattacattcagactgctaacttcagtcacaaacatgcttgtatgagaatatggggccttttgttcctaccagaaaataatcaagatgtctatcttctagagttgtactgtatcatagaagtgattcaatgattctgcttttctatttctgtgagaaaaaggcatgctatgggattcaagcactgtaataaacacacacacacactgaagccaggtggacatttatcaaattttgacttcatctcctatatgctgtgagacatgggctatctgcctagctatatatctatgtatttatgtatgtgtgtatgtatctatctatatcaatgtccaccgctgatggttcattaatataaagattgatgatgtaacaccccacatatgcatttcttgacatacaggcattcaaactatgtttttcctttcttcatttcctaatgtgctacactgtgttttcctggtttactgagtatgcctgtgtgtccagaaaccctcaaggacagagctgtgtgctttaggagtcttcctcgtttttgcccctggaacagtgccaaatactatagaattttagttgcatcttgccacaccacctggctaacctcatctcatctactcatgcctttctcaaccattcagaagcacgttctcttcttttaacacgccgtgattgtccatgcccgtcttttctgcatgtgatttctatgtgccatgacacttaagacttaccaccctttcctaatacatcgttcatgcagatctgcattcttagtgtataaggcgcttatgtgttctactgtaactttgctagattatggtgtcaccatggtttatgtctgtcttaccccaaaatattgtgaaagacacaaacgacattatctcattccagtctcagctggaatttcaaatcccattgtctaaatcaaatccaggtgaagatgaggctcttcacatgtagttccttaagctttggcaacatgagtagagttttcttgacggtagatgtgttaactaaagagacaattatctgtcccacatacacctaacatgcaatggcagacaagcaaacaacattatagacatttctgctcaaaaaggatggtggagggaatggaaggcactgtccagtggaagaatcgctggtccatagcaataatgtcaccaaataaggcaaatgttgtaagttccttgtttaggtctcaaaagtgatatcacaccacttttgccatatcttatttgtcaggagttagtgggtcaatctcacattataaggagatggggtccttgagggcatcttagagattgtctaccacacagtttcccagagcctttggctagtttgtgtaggacttccatatgccacaaaggcctgtgtcacacattcttttgtgttatcttctcaatactgcctgtttaaggtgggtaacagttactaccaacaactaggaccccaggaaaagctcaggtttaaatacctgacaaaccaatgattacattagctgccagtggatacctctgtgtgggtgattaagactattattcacctgtaaaatattcatacctctctcacaggaatgtggttagcataaaacaaaataatctatttggaagaaaacaagcataccctttctctaaaaatatttacttttataagtttatgatgctctcaatgtgtagaagacatcgtttcaaatgtagttacataatatgttgatgtatgcggaatgtgctatataagaaggcatgcctttttttcttggaaaattatattgtcataaaaagtcatgtttttgttattaaaatcaaacactatgtatttacaggtctttttttgcaacaattgcccaatcaaattcttatttctgtgaataaatgatatattattattaattatacatttagaagaagcctcggagatcagcaagttgaacctgtcccttttagctgatcagtctgtatatagagttgaaatctgtctgtctgtatagcacaatgtcatgaagtcatagattcctggaatttaatctttgctcttttaattactagaatttgggtacattaattttcctgagtctcagtattcttgtctgtaagacagggctaataatagtacagtgtatattctaacaactcttgtaattgttgaaaagaatttccctagtcaacttatatttgttctctaatctgctccttcacctcatagtctctctagtccttcaagataattatcttggcttctctctaagtcttatctccttagtcatacttattatgatattattttcaactctttcttttcctgtgcactattttcagaaaagcttcggtttgtcattaactcttcagaagttaaaacctatgtcccatggtattttgaaacttagttgagagaatgcatgtcatacttccagagtagctcatatgcagtaaatgatccaaagtatcctgattcatcttttctgtcattttttttcacaccagagttgtgtctctctccaggagatagctttgtaaatattttgctatagtttttttttttttcctcttccccagccacactttacagagtggagatgatactatgcaattctgtctatttaaaatgtatttatattaagttttcttggtatggaaatattgcttatatttatcttgtaatttgttttggctttatagttgtataagagatataagcaaaatgggtctacactttgttttacctgtctaccattaaaaatttcccttggggggaaaaaaaagatgtttgtcttacataactgcagttgttttatatagcctttagtcaacaaaaatatcactcttagtggactaggctagaactgtcttttagcaacttctacttatatatttatgatgatttacttaattgagatataacactttacatattgttctaactttcgtcatctttgttttttctgttccacagataaaaaatacagatatttttgcatattgaggaaataaagtttaaaaatttgacattccttgagccaaaagaaatgtggaaaatatttttcacctttctgttttgcctgattaatgtttaaattctcatcaaaactaaagtaatttttaaaatgccattgttggtaagatctcacagtttggcaatgcccacagttatgacaaacacagaaaactggtatttctgtaaaattgacgctatactattaaaacaatgtgacattatcccctgtccttctttaaccagtagcatacttgtgttttctacttctaactgatcattattttcccatcatatatttaccaaattttacctagagttgtagaaccaaatggttcttactcttcatactgcaaagacatgaatgatgtttggtaaccaaagaaaaatatatgttgcactaaggattagtgttcttgctgttgccactggtctgaccaatgaaaagatggtaatgtgtatattaaagttcttttctctcatatatacaaaaaatattgattctgtcttataacaactggaacttttccagtcattctgtccttcagatatacacactgacaagtgaggacatactgagatgggcgtggatgtcccttatttattgtttgctgtagaaatggaatcacaatctcagaactacagttccagatttcaaaaccttctttttttggcttgatgttataataggaaaatatcttcaatttggtaaagtcaatcttctatccaagaagaataatcttctgcccgtaactacaacttttctaaatactctttcttttttggaaaatgtatggttatgtatatattttactacagagaacacaatgagttttctaacacaattgtgacaatagaaggcaaaagcatgatgctcctgtagctgaaacaggagcattatctttgggaaagctggagttttctctgaagactacagtgtgcctgctgggtcacagtgattccatggtccggggagattgccttattatgcccaacatcttaggaggctgacatttctgtcaagttgccattgtggaaacagcaataggatatgaatactattatttattaactataacaagttgcaatttctgccagtttataaagctacttgagtttgtaaagcttctggttatgtaaaagtgagactgaagtaattaagaccaaatataaattttgtcctatgtcaatacagatcttcaaaaaaataaaatacaaaatatacattgtaagccaactgcaatgtaatcactgtggctttcagggtttgaggtattgaagaattgtaggccatctttgggggaaagtttaccggatatcatttggaaatgaatccccttttgagacggggtttcaccgtgttgcccagtctggttgcgaactcctgagctcaggcaatccgcctgcctcatcctcccaaagtgctgggattacaggcgtgagccaccgcgcctggcctatttttttttttgtattattatttttttagacggagtctcactctattgcccaggctggagtgcaagggtccgatctcggctcactgcaatctccgcctcccgggcccaagggattatcctgccttagcctcccgagtagctgggactacatgcatgcgccaccacccccagctaatttttttagtagagacagagttttgccacgttggccaggctggtctcgaggtcctgacctctggtgatccacccacctcagcctccctaagtgttgggatttccggcgtgagccacagggcccggccttatcaaagatttttcacgaaataaagataatttcatttccttggtttcaacagtgtttcatggaagagtgtattattttcttctcctattatgtgtcttcttttcatatgccctcaatttcccttactcatttatcttttacaaaggcacttcctttctttatttggagctcaaccctcactagcagtacctcgcatatacatgagtttgaatgttcccttacaggaagaggaatgtatttttggcaattctgagcctttttataaagttcagattggatcgatacgttttgcagctttttttgactaaatgaaaactactttaaatgcattattttacctatccgactgactttgtgaattaatggaataatacgagcaatacacttgggctttggagcttagtattgtcagtgctatcgatttgtttagaatatttccatgaatagtttataggatcctagcacactgtggctgaacggaccttttgagacctttcagtctgtaatccagattcttatacttactgagaactgaggctgagatgctacaagacatgcctacattttctcaagtaaagacaaagttaggtttcaacagcaagcatttcttagctatctgctactaggcatagtcttatcatttcacctttactgcttttgtctttaaatgacaaccagttcagatcctcaattcttatagcccaatgtatttatacctagatagaaagatagatagttgtagtccttcttcaatgaggattccatacaattagccttgaggcttaatgacacccttgtaaaatcgttctaattagcaaagatgcattatcacagaagcagttcttacccttcggaaatgtctcgggaaatgtctcacgcagtcattattttgatctggctaaagatgcagtgtagcaagagtggctaggttctactcctagacgctgtcatggccttgttattttcaaagggtgtttgtaagctcctactaccgtgctgcattcatctgtgtgtccctcatgcccagctcagagattaggatagagcaagctcttaaatgttgctggacaattggattttcataagtcacttttaatgattttacatacccaagcatcagctccgattacgctgaaagtgtgatgctcctcttacctagatgacatttaaactcccttcatattgaaaaacagaattatctaaacaaaaaatatggttgaaagagtttatggcaaatagaatttggctgtgaattatgttttccaatccctgctgtatagagcaaattgttagaatcagcatttataattgagtttcaactaaatgctttgttttataatttgctgtgaggtaattagaaaaatgtgcatgaaagcatgacacgtataaatcacaggtatattcatctgaagtattttgtgcagtttatatttatagctcattctgtgaagctaaatccactgtattgaaacagacaattaaaggaaggtaaagggactattttcccagcaattgcaatgtgctaggcatgatgccaggcactgcacaagctctatctccattaatcttctctaatgtaaatattgccaccacttcacaaataaagaaactgaactatgtataaaactgagcttaaggggattaatgaatatattatttgttgttgaacatatgcaggtctaattaaagtaattgcaagttatattaaaagaatttgtggtagagacagaagttgaacccagtgctgactggcactctagttattgttataaaggcaatttgtattattgagttactttgaataatacacattttacatttatttaaataaccatttaatttgtaatgataagtttacagattttttaaaaatagaaacatattatggcatcattgtgtatcaaacaagggctatttataagagctcccttggtgtgcttttattttccttgtctaaatggagccagatgactagaaattgtggaaaagcatagactggttcaataaaatcgaacctggagacaaatccaattctatactctaacacagccatttgtaaagtgtgttccctagtgatattaagaggtgttttgtacacacacactcacatagcaaacattaaaaataaataaatggttacatatgtgcatgacagaattccatgatcaaatatgttgagggattcctgggttgaagaaaataaagcatttgttttaaaattgtgtaaatgctcatatccattgacttgaaaatgtgcctcgtgaagctccaagggagaaatggaatttaaaaaatccccagaccttctcatcacaaaaatctcttttacaagaaacaattgttaaatcttggagtgtaagtagatagcatgatacatcttgggaaatgcttattcatttacttattaacaaaagcgtatgagcacttactgtacgccaatcattttataggtattgggaatgcagaatgattaaaactgacaaagatttctgcccttgtggagctaatattctagcaggggagactaaatataaacaagacaaagaagtgaaatatgtatgactgattctgatgattcttaagaaagaaaaaataaaaacaagcagataaaaggctggacagtgtcaggacaaggagttgaatttttaaacagggagccagggaaggcctcactaagaacgtagtattttagtggaaattgaagttaaggaacaagctctgtggatttttaagggaaaactttccaggcataggaaagttgaaattcaagcgcaaggcaactgtgactggagcggaatgagcaaggggaggagttagatgaggtcagaaaggttaccaggacccagatcgggaaggtccttgaaggttatagtaaggaatttggttttgagtgaagtggggagcccttggagggctttgaacacaggaatgacaaaactcggtattagagctgattttttgagaaaagccaggtgtggttgagagggagggtaaaacaatcaggtagaaggctactgtaaggatctagaggagacacgagggtgacctgaacaaagatttcagccctggtgaactccaatcggattctgaatctatactgagagagagtctgctggatttgttgaaagagcggataccgggtttgagagacagcaatcagagatgagccaggatttcgacttcagtaactgaaaagatgttttgaacttcttagaatgaggaagaccttgagagaaggaggtttggagagggaaagttgaatataaggagctaatttttaggcataataatatcaagatgcattttatgtattcaggtgcagaggtggatttggcagatggaatactaaagtaggcggtaaatatcactcagtttacatagatagatcacatggaaattccaaagttagaatggtctagatttaaatagctaattctcatttacagaaacttcaacgtgaaactacaattctataagctaacttgtgcagccctgcttccagaagaaacaaagaaacagaaaaaatcaaaagggaggaaatatcgcctgccccagtcttaagtgattcccattcgttgcctttcctgggcttgaaggtggagttttgagtaaaacagcagcagtggttgctggatgctttctgatggctctacagttgccctgaaggaatctcaataggagtgttccttaagaatcctgctgatgagcagcactccaccctcaccatcttcaactgaaacagccttagaggaatttttgctggtttatagatcttctgttttgacaaagatagctcgtgacatcactctgccaggctgaaggacttctattctgagactggtgacagcaagccaagaaagccaatactctaagtgaatttaatagactctattctcatgctacttgggttgctatgggaaccttattagaaaatacagggactctagatgatctgctaagttttttttttttttttttaagtaatgtaagtggctttatcttcaggaaaaaaaataagttgtttttctaaaattgtgaacatatagagaaaaatataaaaaacctaaatatgttgcttacacatttgttataaaggacaaatccgtgtaaccagacatatcaaggaaaagaacggtgctgattttttaaaagacagtcacttgcccctttctactcacagtacttccgttatctcaaaaccataaccaaaacaaaaaacaacaaatatcttattatggtctttattttcatgcttgtatttagcattgtatcacccgaacaaaactgacttagactgatttattgcatattatatatacatacataatatacattcatcatgtgaatataatttatacattctactgttcatgagcctttggttgtttctagttttaggatattaggaataattctacctttctacattttagtagccatctttgtataaatgtgctcatttctatttagcatcgttggaccataagatatatgtctcttcaaatttaataggtactgccagacacttttgtgttgtggttttgttgttttgtcctttggttttccaacattgttaaaccgatttacatttcaacttgaattgcgtaagacgttctgttactccacattcttttctgcaccttaaatggtccctagtttgtatattttgccattctattttgtgtgtagtgatatcttatttgtctcccctaaatgagaatttggacaattttcgtctttatttgacatttggataatctgtttgtgaagtatctgttaggtttcttattttctgatagatttcttattttcttattgatttcttagagtaattacttatataacatacaacttgtagctttacaataagtttgtatttctggtagatcaagtaaaccaacattatactttttctacaagtgtgtcctagttattcttggcaatttgtatttctgtataattttaaaatcaactctagttatttttaaaaagaaagaaaaaaatgaacttgatttttatgaagattatgttaaatctatagatgagtttgaaaagtattgataaatatttacatattaaatattctaatcggtctgcttaaaatacatattctttctgtgcatggacattgtctacctcttctgtttgggtcctctttaatgttttccaatacaaatttatagtttgaaaaataagaatgaaaataaaataaaaaatgaaatattctaatctatgcttgtgatacagatttctttatatcttctttcatttgtttgtatcttctttcatttccctcaacatattttatagatttctgtctagaggtctcacacatccttgttagatttaccctttgacatttagtttttttgatgttattgtagatgatatgaatttttaaatttcattttatgctcattatcgttacagagaaattcagttggtttttatatattgagtttatagctagcaaccttgttactcttacttattacacataataattcatctgaagatatttttggattgtctataaaatcatgtcatctgaacattaagatttttttgttctctcttaaatttaaatattttattttttcttaatgtctctctgtctgggtagaccatcttttacaatattaattaaaagtagtcatagcaggtttaattttcttattcccaatctcagaatgaaagcttttaacaatttaccttgaattatgattttgcttaaggcttagaagctatctgctattgcagtaagaaagtttcccttctatttctagttatcaaaaaaattttaaaaattataaatatatattgttttactcaatctatttgtatcatatgatttatcctttagtttgttattgtaatagtaaaattgattagttttcaagtgttaaaccaattatgcattcctgtaataaattcaacttggttgggatatattataccttttaaatattgctagatataagagttctatttttgaaagattttttaaattcacgtttataattgtaatttgggccttattttaccatgaggaaatagagatgttgagtactagtagacatttttaggcctaaagatgaaaagtcttcagtgtagccaaaaaaaaaggcaagcgagaaatgaaagaggcaagaggaaacaacagacagggcacaagagattcaaagagaaaacacataaaaggatgttagaaataggccaagcatggtggctcacgcctgtaatcccaacactttgggagaccaaggtgggaggatcgcttgaagcccaggagttcaagaccagcctgagaaatatagcaagacactatctctacaaaaaattttaaaaattagccatgagtggtggcacaggcctgtggtactagatactcaggaggctgaggtggaaagattgcttgaacctaggagattgaggctgcagtgacctgtgatcataccactgcatttcagcttggatgatagagtgataacctgtctcaataaataaataaataaataaataaataaataaataaataaaagttaaaaataaatttaaaaaataaatcttcataatcaatggacatatgcacatacataccaggcaaacaataaccagagtaatgtgtattattaatatcacataatataaaattaaggaaagtttattagaaataagtttctctctagttaataaaatgtttacctaactaggaagataaaaaattgtgaaggtatatgtacctcataacaccacctcaaaatatataaaggtaaaaatatgtgtgtgtatattcctgtaactatgaaattgatagaataaaaaacaaacttaaatatttataacataatgggatatcttaggcacctttcatagtgattgatagatcaaataaataatcaaaaatttaaaagattatgtatgatatgaagtgtataattaagcttgatgtgatggtcacataatgaatgttatatctgaagaacagatactgtttccaggaacatatcatttatacaaataacaacattctagtgcataacacagcctccacaaatttcaaagagttgatattttgcacaaaatactaaccacagtggaataaagttaaaaattaataacaaaaaggaagaccagttatgccttttataatcagggatattaacatatttatagttaattcttagaactagaagtaatgataatggaaattaggatatatttagaattaatagaagtgggccaggcgcggtggctcacgcctgtaatcccagcactttgggaagctaaggcgggcagatcacgaggtcaggagatcgagaccaccctggccaacatggtgaaaccccgtctctactaaaactacaaaaatttgctgggtgtgttggcgtgtgcctgtaatcccagttactctcgaggctgaggcaagagaatcatttgaaccagggagtaggaggttgcagtgaactaagatcgtgccactgcactccagcctggcaacagagcgagactttgtcaaaaaaaaaagaataaatagaggtgaaaatacaaatacttcatattgaaatgtctaggatgaagctaatgccatgtttacaggtaaatttatgaacttttcttatattagaaaagacaaatggctcagtgtaataaaccaaaaattccaccaaaaaagttagaaaaaatgaatcatagtaaaccaaaaagacagaagtaactgataaagaatagaaggaaaaaatgaaataaaaattatcagataaagagaggatcagatgagacaaaagttggttattaaaatgttaccctataacaaaacaaaacaaacatcaagctcagttgattttggagatgagttctataaaacgtaccagcaacacaatttcaagttatacaatctctttcagagaattgcaaagaggaaacatcccaaaatttattttaaatgcatggcataaccttaaagacaaaatctgtcaaaaacagtacaagtgaggaaagagcaaattgaacccagcaaagtataaggagataatatcacttgatcattattcctgtaatgtaatatttcttccattttagcaaatgtactaggtgtaaatcaccacattaaataataaaggagaaaaaaatgatcattttgatagtaacaaaaaataattaaataagcctagcatatattttttttagatgaggaaaaactgttaggcaaagttttacacaattccttttaaatcagtggggaccaatagttttaaaagggtaagatttaagctgctctacaaatctacatataaaccaatttgtgtcaacatctcccattttctttgtcatccgtaataccaattttggttctcaggttaatatgtcatttttcctgtttgagatttttctcctgtacttagagtcctttaacttctccactgcctctcacatctttttgtataaatttgtatttttcctattaagactcaattcatctattaccttcactgagaaatattcccgagaacccttaccctgaattggcacaactatcaggctccataagttttgcctctacaataattttttttttaactttaagttctagggtgaatgtgcagaatgtgcaggtttgttaaataggtacacatgtgccatggtggtttgctgcacccatcaacccgtcatctaggttttaagccctgcatgcattaggtgtttgtgctaatgctctccctccccttgcccccactgcccgacaggccctggtgtgtgatgttcccctctctgtgtccatgcgttctttgttcaactcccacttatgagtcagaacatgcagtgtttggttttctgttcttgtgttactttgctgagaatgatggtgtctagcttcatccgtgtgcctgcaaaggacatgaactcattcttttttatggctgcatagtattccacggtgtatatgtgccacattttctttatccagtctatcattgatgggactagttttatgattcatttctatcatggcaatttctatatgatattgctgttaatatgtagatgctattcccactgagctgtgaactactcaaggcagggggtgtgtcactcatttcagacctccagcccttagcactgttccccacatcctgagggcatccaatacacctttgtcaaatgggttgaagagttgagcttagaaatttacattctttgttcctgggaaggctaatcatagagaaggcataaacatgaaacattaaacaagagagtttaatcatattttaagattatctgagaaaaaaatgaaagacaatccagcacaataacattctttttttttttttttttgagacagagtctcgtctcgctctgtcacccaggctggagtgcagtggcacgatctcggctcactgcaagctctgcctcccaggttcacgccattctcctgcctcagcctcccgagcagctgggactgcaggcacctgcctccatgcccagctaattttttgtaattttaatagagacggtgtttcaccgtgttagccaggatggtctcgatctcctcacctcgtgatccgcccgccttggcctcccaaaagtgctgggattacagacgtgagccaccgcgccctaccaataacattttatttctcattttaatgttgtaaaataaagtgagtgacagctggtttgagtcaccagtctgctgtttactggctggcctaatgtcatttccttgttggtaaattatagataattattttactatagcattaggttgttgataggatcgaatgaaatactgcagctaatgtactcaatgcagtggctgagacatggaagtgcctctgtggtctatgagtattatctttccaatcttgagaggtagtagaaggctacaaagtgttggcgtttgagtggtgtttaagaaatggagacaatttgaagagaaagtgatttgggggtttgcaagtacagtttacatgatgaaaggtaagaaaagaatgaggctgacatttattgagcctcttcaacatgtgagttgtttgaccaggcatcttcctgacatcctaccagttaatgctcacaaccagcacctgatgaggtcctaccacaccatttactcatgaaaaactgctctctggaagttatgaagcacatgctgaagatcacacttggtggaaccaggctccaagcctgtctgattttatagctactgaacttcttctggagatggctagaaaaggaggaatcaaggatctgtagaatctttcctgtgcctggcaaagaaggatgaggctgactgtgaatgaatttgtggatatagataaatagctattttccatgaaatacctgtttattgttgtaggacatctaaaagcagattttaatgagaagaatgatgttttgattttctacatgaaaataaatgtgaacattgatatatgtaaaatatgtaagtgaaaacctttgctttttgaaaaattaaagtcagtacctcaaatgtggcttataagtcagcaaaacaacctgaaactagatttaatatcatgtttattcaacaaattatatggttagtaatcagtatgaaaggttgtttcttcccagtggactgtagcagaaactaacctcattacatttgagaaaccatcattgctagggactagttgaaatgtctgtctcagaatggcaaatggaattgcattttaaagaaacttagagtctttattgttttcatcactaaaccccatactcatgattagcaggagtcatttgtcagctgaaatcatactggttcttccattttagtttgatccatttccatccatctgctcatgagagaagaaattcggtttggtgaaggatgtctggaaaatgcgaagaccaccaacttgggaaacttttatcatcacgatacactgtgtatgtctctgaacaacaacatggtttgaatgaagcaaaatagagacttaaaatgtaactaaatgtacaattgtatgaatgtgtaagtgctatggaagaagaagcctttagaagttctcaatatttactgcagaatttcaaaatagtcttggattaaacaccttttgagaaaaaaatagacgttcctaaaccataatctaatgcttgagagaacagaataattttcagtacaagtaagtttaaatgctaaatgagatgagatggttaaatgtccagatgaaaggtaaaatacattgttccatcactgaattcacagtaacatgcaaaagatccatcttgaatataacctgcccagtccctgaaacaaacccaaggcttctttttttttctgatcttgatttcttgaatgcatagtgcttttaaagaactaacatgtcttttttgttttgttttgttttgcgatgcagtctctttctgtcacccaggctgaagtgcagtggtgggattttggctcactgcaacctctgcctcccgggttcaagtgattctcctgcctcagcctcccgagtagctgggattatagatgtgcgccacaatgcccagctaattgttgtattttttagtagagacagggtttcaccatgttggccagactggtctcgaactccagacctcaggtgatccacccgcctcagcctcccaaagtgccgggattacaggcataagccactgcgccctgctagaactagcatgtcttaatgtgttaggtaataatagaaatgtttcattctctaattaaatgatgaggtgattaatagtaggttaaagatactgtaattatatattgagtaggatactattaatatatgttcacttagcacttactataaggaggaagacataatgtagccttacagcccagcaactagggacccttccaacttcaggtcctcaatcttgtgcagcagacctgcagagtctccttaaagggaggccagatgtgccagagagtcagtgcccctagagcaaccctcaaccaatgagagatagcagttgataggtaagttccacagcctcttgctccacattgggacaaccctgagtctgtccacactggggctgagccctggttgcctacagtggtcagccacttattaatccatcctttattggtctctcccttttttaactcccaaaccccctcacagtgttccttgggatcaattcctaaatccttctctcagagtccaactaaaacgtggaggcaaatatgtaccaaatagagctcatgttctcccttcaagaccacccttcaggtgtcaggagcctcacctggaggctccctacccagatggtcttaaggtgctcacagggccagctcagatcaccctttccatgggttctgactacacaaaagtagatggtgtgccacagtccatacccctaggcccaaaatttggaatgaccttggacatccagattgattgcatacacatttgcatgatgctcttgtcaagaggaaatcagagtgagaagggaaagggagcaggttctgggcctgggcctccatttgcattcttgccttggaattctgagacattaggtgtggggctgaatagaaggccaggagttttaccttttttttttttttttttttttttgagacagagtctcgctctgtctcccaggctggagtgcagttgtgcgatcttggctcactgcagcctctgcctctcgggttcacgccatttttctgcctcagcctccctagtagttgggactgcaggcaccccggctaatttttttgtatttttagtagagacaaagtttcaccatgttagccagagggtctcaatctcctgacctcgtgatctgcctgcctcggcctcccaaagtgctgggattacaggcttgagccaccgcatctggccaggagtttttatttcattggttacacgcagtgaattattggcaggtgaccaaattgttttggtctttaacgacttcatgtgtataatgagggatgtatctaaatttattcatagggtccctacaagaccataggttctcattgtcaaagtcatagatagccattcttctgcacataagggacactaaaaagtacccccttattttctggctgggatctctgaatgctcacactgtatgatttggtggggctctcatgccatctgttctaggcctctatttactcttggtttaaagaacctagagtccaaaggtgcatgaataatgcaagtcatattttagataaaataatacagataacaactgtacttaacagtatgaacaaaatcatgcaaacaaaaccaaaattgatatctgaccagggagaaaggacttaggaaatatatcagtacataaatagtgaatttttatttggatgtgttgcaggaatgtgcgtagtatttttttctctgtgttttaactttttcctacctgtgcatttcttagaatcagtagctttgtcagcatgcactcagagaaaccatggaagcatatttagtaataaaattgttattcttatagacaaatataatcgtttaggaactagcatggcccttttattctcaaaactagcctcagtcattgacgatgattgctatttaaaggtgtagagggaaatatttggggaattgtctgcgtatttcaaagtacccttaaaaatttaaatcagacaaactggataaattagacatcctcaagtactaataggcaggtctgctctaagaatagtagaaggtagaagaaattaatggttacgagaggggtagaggaaattaaagttaataactaaagatattgcactagtttgtttttgcattgctataaagaaacacctgagacttcgtaatttataaagaaaagaggtttaattagctcaccgttctgcaggctgaacaggaaatgtagtgacatctgcttctggggaggccccaagaagcttctaattatggcagaaggcaaaggggcagcaggcatctcatatgatgggagcaggagcaagagagagtggtgtcacacttttaaaagagatctcatgagaagtcacacagtatagcgaggacatcactgagggaatggtgctaaacaattcatgagggatcccctgccatggtccaatcacctcccaccaagccccaccttcaaaattggggattacatttcaacatgagatttgggtggggacacgcatccaatctggattgcatatcctcatcaaaatgtcaatacttttattttgatagtgttactatcattaactatgtacagtactttattgttaacaatttttttctccagcataatactgtttagtatgacattactgtaaattattataaatgtcttaaagattattaatttcagaatgtatgatgtattgcctttaaaaatgaacatggactttttaaactaatataggtataggaagaaataaaatctcattccttgacaaatactaataaaacttattattgagaataaaataaacagtacttatattatgtcagatattctgctaagtcttttgcatgcgttatttcattttttaaaatcacagtggccttatagggttggtataatgatccccattttacaaatgaagaaaatgagacccagacacactatacaatttccccagattcagtcagaaaataaatggtagagctgaaaatgtactcacatcctaaaggctaaagcctttattatgataaaactctgtgagatgacacacattttgatgactgcattagtttaaaggaaatttttttcatggattttgccttcgttttgctttgttttgctagtgaaattggtcctgctaagcagtataacacaaaatgagacctcagatctaaaattcagagagctctaaaatcaccaaactaatctaataaaagaaaatacagattttaccgaaatttaataggagttagttaatataaatgtttgaaataataaacatccccagaactatctaacagcatgtgttataatgtccgtttgaactgattttaaatgaatagaatgtttttcattccctcctgtactgagagcgcttgcctttgagtgttttaatatgtcagggatcatttatattctcaaaaatatattacatttatttggtttcattctttatctttcaaccgtgttttaaatatttacaatttcagcaaatttgaattttttttgtctttaaaatgcctctccaaaggttttgaaatctctatgtgtttgtgtgtgtgtatgtatggcttttattggccactgatccaagtcgctccaaccttagagaggtggaaaaatggtgagaatatggattatgaagggacaaaaggatggaagccaaaaaaaatacaattcataaaaggtcctggaatctttcctacacaaatgcccagaggcctcctcattctcaggtactgctctctgcaggatgaacctttcacctccactcccatccagctctaggagtgatcctccagaagaataatgggacttttagtgattccctgtagccaatagccaagcggcagcagaatggtacatacagaacaggtgaagatttcttaagcaccagcagtgattagaacacagtgggataaggtcaaacagagcagcagatggctaaaattatatgtgaaagtcgttttataattgtgaagaacttggtggtggtgcacaaatccacattctgtgttattcaggtacctaacatcaatcctcctggtttggaagacttcagatttcacagtttagtaatcaccatgctttagcaatggtacttgcttttatttagcggcactgtaataaagattactcttaatttaaagtataccccttatatagtagctttttcgtttcattttaggttttaatatatttgttactgtagctaaatacataaatggataggtaaatatatagctagatggatataaccaaccgaaagatacatgagaccatttttagtaacattattctattattgcatatatttcatatactatgtacatcatggacaaccttgatgatgagactcaggcaatctgattaaatattgggtttattcacagtttgtaaatattgggtttattcaaagtttgtgaactcaggaggacacagactccaaaaggaaagggtcagtgctccaaagagggaatgtttgaagatcatttaagcaggaaagttctggggaagattaaaaagattacattatttttccatagagggttagtgaatagttacaacaatttgcttagttatatgcagcatttctttttttttgaaaggcatatttaacattctatattaaagaaagacgtaatagtcaaggggtcttttgtctcagtcaaggggtctttttttatgtcagggccacgtggtcttagccataaaaaaggaaattcggaaggaagttaatctatttttgaaaggtcagtaattaaaagttcaagctgtgtgactcagtttccaaagtcaacaatcttcagggcctaataacttttagaaactccaaatagacacactatccatttgctttcacatcatcaattatgtatttaaaaagaactttgtttctgtatacattattatatgtattatatatgtgtatatacatatctgtatacacatgtatagttgacccttgaacaacatgggtttgaactgtctcggtccatttacatgcagttttttacaataaatgtattggaaaattttttggagatctttgagtttttgggtttgaactgcattgatccatttatatgcaattttttataatatattggaaaatattttttggagatctatgagtctttaaaaattcacaggtgaactgtgtagcctagaaatatcaaaaaattaaggaaaagttaggcatgtcatgaatacataaaatctgtgtagatactagcctatttcatcattaactaccataaaatatgcacaaatttactataaaaagttaaaagttgttaaaacttacacaaacacagaccataggtggcatcatttgcagtcaagagacacataaacaaatgtaaagatgtagtattatgtcttcactgcataccattcactatagcacatactgtaaaactgtaataagtttgtagttgcttcttgttgctatcgtggtgagcccaaatgttgagcgtgtttgcttaaaatacgtgtgatactaatcatctccatgtaagcattttgcctctccagtaaattgtatatccagtaaaaagtgatctctctctcttgctgttcttatatatttttcattgtgtttagtgcagtaccttaaaccttgcataacaccatgggacccatacaaagttctgctagtgatgctggaagtgctcccaagaagcagagaaaagtcctgacattataagaaaaagttaaattgcttgatatataccgtggattgaggcctgcagctgcgggtgcctgccatttcagacacaattcatcttgtaaacagatgacataaacttatggtattgataaataaagcacagtacttcaaatgtattttctcttccttatgacttccttaagaacatttgcttttctctagcttatcttattgtaataatacaatatctgatacatataccaaatatgtgttaatctactatttatgttatcttaaggcttctggtcaacattaggctattagtaattaaatttgatgggagttaaaagttatacctgaattttcaactgtacaggggtcagattccctataacttccacattgtccaaggctcgactgtacattacatatatatatatatgttataaagaccagcaagatttcagacacaagcagtgaagtctggacttacagatgtgttgactctggttactgtacatgtcttgtcatccctttggcattcaatcgtgtcactttacattatcagcttgtattttaacatcttctttttttcaacaaatatgcagaatagattttctaaaagttcagacatggtacaagacaagcttgtccaacccatgtcccacaggccacatgtggcccaggacagctttgaatgcagcccaacacaaattcataaactttcttaaaacatcatgagtctttttgtgattttttttagctcaacagctattgttagttttagtgtattttatgtgtattgcaagacaactctttttcttcaaatgtggcccagggaagccaaaagactggacacccctggtgtaagagatggtggcatggtaatcacagtgcctctttaatgtgtcatggatactcattaatcattcaacaacagaaaatggttggtctcctttgccctccttaaaatgagacatggaggatgagcagcatttaaaccggaagaaagggagcttggtggggaagatatttcaagcaaaatgcatcaaagtgaagttctagaggtagctaagtatggtttatgcacatctttgttgaaacagtattcctcaatgttttttatatcatgggaaacagaaactatggtttgtgagatttgaaggaatacatagaagcatatcttaggcatatgaatgggatatgcctatatcaaagaacagtaatgttctttgctagacctctgtgttagagaatcatatacatgaacaaaaatattaggaaatcaaaaaaagtagatggggaaatgatttcagagggtttcaatggtgataatgatgtcaacaaaaatagcatcgactatttttccctgaggagcccaaagtatttctgatacatacttccagtcatagatggaactgattgagcacaagcttaattctaacagaaacaaaatgtgagaacttgaactttaaaagaacattttctatcctgtagaaagcatgatctaaatttatagtatgcctgacaagtgtggatttttcacaattccctgaaatacagaaaatgaatttaattaattgtgctccaaggctgagttcatactttggcttgaattcattagcaagtagcattttaaaaaggaagtttggttgtgggtgtctgtccaatttggaaatatttacccatggtctttatatttaaaatgtgtttttgattttcaaattctgcagattatttatatccatatgcctgttcagtttggtgtattcataacatggttcacactggccttgtattttctcagttcactgtatttatcagtttctctccgattgtcttaatccatccagtcctccattccatttcctaggcattttctccaaagccttaatttctttgtcttcttcttctgtgttgacagtgattattgaaagctttttcttcattccaccaggttacctgttcagaaattgggcttctaaaataaggcatttagcaccaaaatctctattatttgaatggttattccatgttttcactgttttgttgtttcattgttttttgtttattttgttacatgtttttactgaattattatttttatgaagttcttcgatagtgcaaaaatcttggggaaagtgtgcttccttttctttaaatacactgtctttcagaattggcttttactttccttgctttctgaacctttattttccttcattcctgctaacccccgacctcccatttctttcttcctttctctctagaatttaaatagttatcaagttgcttcttttcatttgctcatatttatttaaagggcagctttgtctgaaacttctactcatctggatgcactgagggattgctctctttgaccctatccaagatattaacaatgtttctgtcttttccctgggcttcatgtggatgctaattttgcttctaaccacattcctgtatcctgagggcaatgggataggttagaggctagcttagctgtggccatgtcatatgtcaatctagcaagactagattatctttaccaaaatcttatcaaaaatatcaaacatggccttctgcacccagctacgtgctatcctgctcatacagcttcacccaatttctaaaactcagcatactgctctagaactttctgactccactgagctcccatagcagtatgttggggcttctcttcttaaaactattccctcaagtagtctcctcagctctaaaaattgagtgggaaaaccagcaagaatcttcagggctttattcccttctgctcctcaatattaaccctgtggagaagacatggggtttgaggcttcacacgtcgtatcataatttatactacttttcatgacagcaatgttaaaataccttgtggcataagatcacactctagtccttttttagttgctgctgttgaactttgggcttttattaaaacattaatttctataggtgttggggaataagatttgtaacctggctttacttaatcatctttatccaaaaaatattttaaaacagcaacagtttgacataaatgtagcctcagaattttcaatattagaagaataaataagttataaattttgcctatttctatattgccagatagaattttaagaccacaagacatcatgaaatttaaattaaaacatgtccagtaggaaaaaaggttttgtcacttaggtaacatgactaacatcctaatatgctttctcgcatttttttaacataaggcaatccattgagcaaatcacaccaacatttttttttcatcattcttaaatgtctctcttctagaaagggtgaagcatataaaatcaccttgttattaaaggagttaagaaagaagtctgcagaaatcagtttggaggaatattgaatctagtgttttgttttttcatagaaactttagaaggcatgatggtgattatacacataaggaaataaagaatggctgtattaggtcttaattagtgattataacagtggcaaaataacagaagttgaatgggtccttacatctcacttcagagaaaagtgtaaactgcagtcaatacaaactgatttgggttagcagtcctattattctcagttgcccagagaatgaagaaaatgttctttatcccatcgctaagagcagctacagtgaggcatcctctcttggggcgctgtctacccttcatgcctctagagattcttggactctttgctgtcttcactgagttttagttcactgggggataaattcttataatttctttccaggtttaaaataatacctgcctatatttatttgacattatacagaaaaattttggaagatcttcttatgtaaaatttatattctgtggagttgaagctatattatgattttataattttctggaatatatcattttaccccacttttaacagtttgcgaatcatggattctattgtagtctcctcctttctcaagtcagttcacatcttgacaaattttttattaatcaggattatacaatgttgatccagtctgtctggaggctattaagaagcattaatggaataaaagggatattaatttatcatcaattatttaaatggactgtttcttaaaccagtctgtgttttaatataacttgggcctatggaaccttcgtagttgctattaaataagaaatatatgtgatgtatgttatacaacatataaggtatatattatctatacacttttcatttatttcaatacagaaggttttccatttaattccacaggtattttttaagcactaactgtatgcataggtactgtatataaatacaatgtaagtagaagctgcagcccatgttttgaggatgtgaagtctacatgtgtagagcaaatgtgtgaaaattatgaaaccatttaaatatatattgatcaaagcatgtaggcaatgttttgcctgtcttgaaagcttagaaccttagcctgacttatgaaacttactagatatttacccgtgggataaaccatcattcctccttgagcctgattaagctctctttatgaagacattatggataaagtgtcaaaatggtgcctggtttggagtagcttctcaatagccattacttttctgcaagcctgatgaagcatctcacatcacaagagactttcagatgtctgtgtattgtggtggaaaaccaactcccattcctttgcaaggccagaagcaaaagctgccatgaggaggtggtcttaacatggcctggcacatgtaagctgttaactcactaggaaggaacaagtttgcaactggtgcaggagaatgtctcagtgatgagcaagacttctgcagtgagtccacaagtatgtctttatgcctggaattcattatcaaggaattcagaaatgttttctgagaagaaatccacctcggtaccctgcatatttcagtacaccttgacctgagcagaagatacactgagacctgccaagttctgagcatgaaaagctttaattcattgtgttaaatggcaaaaccaagcaactggtgatttatggctgcaaattatcatgttgttcattagtggtaattactactcaaccctgaaataaaacggcaatcagtatgctaaaatgagaacacccacgctaactccttgctgttcacctgcaatcctctctgtctgtctcactttccaagggaagagaaaaaagactgagggaatccaggtgcatgtactatggacagagatgagcttctggccatactaaactgcttcagtggctcctgtcaggcaaaggagcttagctccatccctagatgctctctgttcacaatgagataagagatttgtgtttggacatactctgggaatgctcagattgctttcagcgactggagctgtggcagtcaggagggagaggaagccaatggaggtagtgtagtgagtagacaccacgccctcagcgactggagctgtggcagtcaggagggagaggcagccaatggaggtagtgtggtgagtagacaccacgccccagatgactgtagctcccgtggaccccattagcactgtcctccagtagtctcttcaggctatatgcctggctgaccatcaggaaactgaggccatgccttgcgtagaaagacttaatttcacttttgaacagatggccagaaaccatgcaatttcacctgctgtatctgttaatgtcacactaaacagctatgaagtaaaaactcccatgcaaacaggttttcattttatttctgtcacaattattacctcctagagatgaccttcaatgcagagaaatggatttttgactttaacataatgaatcttatgagcagttcacacaggcattctgaagaacaatacaggttgaacatccctaatctgaaaattcaaactccaaaatgctccaaaatctaagattcttgatcattgacatgatgctacaactggaaacttttacacccgacctcatgtgacaggttgcagtcaaaacacaagcacacctctcatagtttattcagtgaccccaaggggaaaaaaaaagaccctccaagtaccattcacttgtgataggtattttctgtgcacacctagatactcccacacaagtatgcccacaatggtaataaaatgacacatgtgcagaccagaagcaccagcagtaggttcctaatgatgttccacatgaggccaagacctacgttcattactcactgaagtttttggcttatgctatgctctgtgatatcaaggatgtgatgatatttgttgaaaatgtcaaaaaagcctgtagatacctctatgagtaacagtgataagaacaagaagaaggatttatgttaatttagaacacagaaagtcaagctgttggagaaactgaacagcagtgtaagtgtgaaccatcttacagaagtgtatgatggtagaatggctaccatatatgacttgaagaaacagaaggataaactgttgaaattctatgctgaaagtgataaacagaagttaatgaaaaatagaaaaacactctaaagcgaaaactgaaggtcttgattgcatattgaaagagtggatccagtagtgtcatggtaaacatatgacaatcatattctggccatgaaacaagaaaataccaattacaatgagctgaaaaattatagagaactgtgaagattcaacacgctggctgcagaaaatttttaaaagacaaatttgtaaagacttgtgataaatcatctgcttatcatgaagcagaagagaaattcattgacaagtttgccaatgtcatcactgctgaaagtctgacaccagaataagtctataatgctgatgtaacataacgattttggtgttattgccccagaaagaaactgactacagctaatgaacagctactagaggaattaagaatgccaaggacagaataactgcaccaggatgtgctaatgcagcaggcacgcttaagtgtaaacttgctgtgttaggcataagcttgagtcctcaatgttttcaaaaggctaagttcttacttgtctattattatgctagcaggaaggcatgaatcaccagagacatcttctctatctggttttacaaacatttgtaccagtggcttatgctcactgcaaagaagctgaactggatgaggactagaagatttttttattccttaacaaccgttctgttcatcctccagctgaaattctaaaaaataatgtttatgtcatgtactttcccccaaatatgacttcattaatttggccatgtgaccagggtatccttagatcaatgatgagtaaatataaaaacactttattgagcagaatgctaacagcagtgaacagtagtctgggtatggaagggtttcaaaaggagtttagcataaagaatgctgtatatgctgttgccaacacttggaacatagtaactgaagacacagttgtgcgtgcatggcacaacatctggcctatggctatgttcagtgactatgtttcaacccttcttgcacagatggactgactttaaaatattgattaatggcagcagaattaaatccctttacaaaaatcattgtcattctttaaatagggtagagggtttaccttctgaattttccatttagcatgggtcagaggtaaatatatatgtatgcacgatctttgcagtgagagaaatcaaagaatattaagatctctttatgcctgctaattttgagttgtgaatttttgagtacgtctaaagaatgggatatggttaagtggtttataagcattttttttcagtccttgattcatcttttcattatctttaagggcagatatttttaatttaaaaaaatctaaaattttaattttttcattcatgggttgtgcctttggcattatatctaaaagctcaacacgaaaccccaggtaacatagattctttctggaaagttacaagctattaatttaattcttttaataaatgtagtcctattcagattatctacttctggtttttgtagattatgtcttttaaggcattgatcaattttatataatttataaaatttgtgggcatacacttgttcataatatttattatattttaatattgatgagatcagtagcaatgatccttctttcattctttatatagtaatttttgtcttctttcatttttttcttagttaaactggcttttagaggtttaacaattctatttatcttttcaaagaatcagtttttcttttcattagttttctttattgatttcctgttttcaatttcattgatattgctctagtttttattatttctcttcttctgattactgtagatattgatcttccttttctagtttttaaggtagaaacttagattaatatttagatctttcttcttttctaatatattcattaaatattataaatttccctctaagaactgcttttgttgcattgcacaaattttgatgagttgtattttcatttttctttaattcatttttatttcaaatttcttttgcctcatctcctttgattcatgtgtttcttatttatattttaatcccataatgatctgagagaatactttgtatgatttatataattttcatgtgttaagatatgttttgtgacccagaatttggtgaatattttatgtgaaattgagaagaatgtgtattctgctatggttagattaagtcttctataaatgtcaattagatccagttggttgacagtgctattcagtcaactacatccttactgatagcctgcttgctggatagaagggttcaagtctttaactaaaatagtgaattaatctatttccccttgtagttcttctagttttagccttacatattttcatgctgggtttacaggcatcatacattttaaaaattgttatgttttctggaaagttgactcctttatcattatataatgctcctttttatccctgatatttttttcttgcactgacgtcttctgtcttctttacctgaaattaatatagtcacaccatattattttggataagtgttagcatggtatatcttactccaccatttatggcacccacgccattatatttaaagtgagtttcctaaagacaatatatactttcatcttgtttttaaaaatatacttcgacaattgcttttaattggtttaggctatttatatttatagtgatttttgagatttctggattaatacctatcatatttgtaaatgttttttagtaattgatgacctgggtttttgtttctttttctttgccttccattttgttttttcatttttggatctaattaagtattttatatgatggtattttatcttctctgttagcatatcaattatgttttctagatatattttgttagtgattccctacagtgtgctgtacatttacaactaatctatgcctactttcaaataatactgctcttgactagtatagataacttataaaaagtacttccggccgggtgcggtggctcacacctgtaatcccagcactttgggaggccgaggcaggtggatctcaaagtcaggagatcgagaccatcctggctaacacggtgaaaccccgtctctactaaaaatacaaaataattagccgggcgtggtgcaggcacctgtagtcccagctactctggaggctgaggcaggagaatggcttgaacctgggaggcagagcttgcagtgagctgggatcatgccactgcactccagcctgggtgacagagcgagactcaatatttttaaaaaaagaaaaaaagtacttccaattacttattttcatcccttataacattgctgtcattcatttcacttattcataaactataaccacccagttatctgttagttcaaataaaaataagaaaaataaacattttattttacctttatttatttttttctgtacctctctccctttccctaagtaggtctgagtttctgacatataattttccttctttctgaagaaggcttaacattttttgcaaggtatgtgtactggtgacaaatttccttaatgtttgcttatctgagaaggaatttctcctttacttttgtagattaaatttcactggctacagaattctaaattggtgatggtgggttttgtttttccattaacatttgaaatattgactgccttctcttgttttcatagtttctgtgtggaagtctgtaatacttatacttggttctctataggtgaggtgttttcccttcccaccattgcacattcccagtctcttttcaggattttgttttgattttgtgcagatttaacatgatgcataatgtagagtattttccatggttggtattctccagcttcctggatctgtggttttgccttcatcattaattttggaaggttgtcagctattattacttcaaaaccttttctatatggttttctcttgattttccttctcgtcttcctataatgtgtgttatatctttttaaaattgtctcctagtttttcaatgttctgttccactgtgtgtttattatttttctctttgcttttcagtttttagtgttgctattgatacatctttaagcatactgagtccttccttgagaatgttaaatccactgatgatcatcaaaggcattttttacttccatttcagttttttttttctagtacttcctttggattatttcttagaatttttatctctctgcctacattacccatctgttattgcatgttgtgtactttttcattagatcctttggcctaacaatcagttaaattcattttctgatcatttaaaaatctctgctgtatctgagtttgattttgattctccctttgtctcttcagatttaatttttttttctttttctttttagcataccttgtagttttcttgtgaaaagctagacatgacatattaggtaaaagggattgacataagtaagcctttagtgtgagtttttaagtaagtttttttcctgtagctagcagtcagtttttgtttaatgttaactgtagttacaggtgtcagaggctaaaatttccttctgatgcccttgtttttgtcttccctgttgtccttggacttccctagagacttctttctaaataaattctgaaacatgtggttttttgtttctattctcctgttattgtgtaggatccctgtttatgtgtggtaaggtgtgcaggaaagaaagtgttttattattctatgatgagagctcaatcctctagtgggcttgagccccagaggtgggtccttcacaagtgatttttagctttttttttttttccccacacccctccccttacatgagacaagctagagaggtttcaaattaggtatttccctccaatgttgaatgttagaggaagctgtaattgggtatttctcatggtggttaggttctggtacaatagttttctctggggaaaggcctttgttaaggagaacagaacattctgagtatattttaaatgaaaactttttcttttcccctgccagatgcattaggggattttcctcatcttcaccatgataacctctagaggtttatggaaggaaaacttatgaaatcatggggatccttctaaggctggtcctgcagaagtttttatatttcaagcttgtccacacccagtgtccaactgttagtcaagtgatgttgaagtgttttaacttgtttctgactccagcaatggcttctgctccctgtaatctataactgtatttatctttctctgcagtttttaaggtagcagtttgccctgtgacttccattttccaaaggctctaagaagacttgttcattttgtttcactttgttctttttgggaggataacagcaataactgctgagctctttacatgccaaaaaagaaactaggaggtctatgacctgtttttgataatcacatatgactttgtagaaatcaggaacaagctctttgacaataattaaggaaatgtcagtcagataatttcatatttgaaatacagtaaattttttaaaaacaaaatgtgtatctttttaaaataaacaatattcctggcacacagtgatgctatatttgcatattcccttaagaatttaaatattgtgtaatttttctatttgctgtggcaataatacaattgagtgaattcttttgcacttcaaagtaaaaaaaaaattagacacaaaatgttcctagtgagattttggctaatctgatagacccatatgtaaatgtgctgtacaaaagtctgaatattttaaaactgttaatgcatgaagtccattttaggttggttccacaacctaaatgatactcactaaacctaaaaaattcagatgataatttttattataaacattggggaatatatacatgcattttcagtttctctcatatttcaatttctgtgatcttataaattcaacaaacgtttatttttctgaaataaagacatttatactcaataaaatactgtaatattacagatctcctgaataaggctctttctagtgctagatctcagtagccttttttatttgttcagagaatggaggaaggcaaaaaaatccaaaaaatatatcatgttctatttgtataaggctttacattggataaaagaacactattgatatctgaatagaactgttatgacttatttgttgttcttgtcattgttttacttctttaaggttggggcaatgcctgagcacactggtttacacctgtgatttcagcactttgggaggccaagttaggaggattgcttgagcccagaagttcaagaccagcctggacaacacagcaaggccccatctctacaaaaataaaataaattagcttggcatgatgtcacatgcctatggtaccagctactgaaaaggctgaggtgggagtaatgcttgagcctgggaggtcaaggttgtagtgagccatactttcattactgtacttcagcccgggtgacagagcaagaccttgtctcaaaaagtaaaaaaggtgggggaacaaaaataaaaatttctgtacagcaatgtagcaaagttccagtataccttatataatgttagtcacctttgtgtgagattctcctctattcagagatgtgagtaaatagatgcatattaagtacaattgtacagtataaagatcccagcaattacattttttttttttttgagacagagccttgcttggtcgctcaggctggagtgcagtggtgcaatctcagctccgcctcccaggttcaagcgattctcctgcttcagcctccccagtacctaggtctataggcgcgtgccaccacgcccagctaatttttgtatttttagtagagatggagtttcaccatgttggccaggctggtcacaaactcctgacctcaagtgacccacctgcctcagcctcccaaagtgctgggattacaggcgtaagccacttcacccagccaacattttaaaaaatgccctctaaatcataaaaatgtccaacactaatttaaatttttccccttgaatcagtcagaatttctcctgtatagggatgcattctgaccgtagcacacattgggaaagtttccatttctacacagtggtggtgcttatacgctcctcagggaatgtaatcatactgctgaattaattgagctttaaaagactttgtcagtaaggaatttgataagggggaagaaaattaaacagggtcctaatattggcccactggaggagaactgaaataattaccgtgcagtttccaattccataatatcatgccagagtggctgaacaagctcacagaactatcattccctagctcaggttatggtcttagtaaatctcctgagtgtaacgtcttgaccaaaacagacaccagtggctatgaaaaagccttcacaatgaagtcacagggataaaataaaagcgacagtccaagttgaaatgccacacaagtcgggctttcatttaaggacaatgctttcctgcccctgtgcagagcctggtgtgcattagagatggatggctgatttcctagttaacctgtagcaggtggcacaactgtataactgggccctctagccataatcattttatttttctggtgcctgtcctttcccatttccccatccctaactcctctgatagttcagtaacttcatcttccttgttggtgcttggagtcatgactggaccatatttctggtgtattttatagcatcttgaatatcctggaataaagtttctaaataatgctaataatgaagtctcttgctgcctagaagtcttggagctaggagcttggctgcaaaactcaaagtaaaattcagaaaatggtgttgtcttggactgaatttaacagaaacaattcctgcttatgactgtagactagactgttaactgggccttgacatgggattggcttagcccctttatattggattaaaattgtatttttatatatacacacacccctgtgtgtatgtgggattgtgtgtgtgtgtgtgtgtgtatatatatatatatatatatatgtatgtatgtatctctctctatatatatacatacatattcttacatgtatgtatattttttcctgggatttgtcttaaaacattctagcaaagcaagaaactgaaagttgacattttccccctgaaatatgctctaatcaccagtgacagatttaaaaataaatggctgagctatttaacttggcaagattacacactcaagagcaggtttcataaatatttaacttatcatttccatattttatacatggcaagcattcacagaggcagtgagatctgtgtggagagagaaaagactgcattcagatagacctgagtttgaatccccattcaataccatcctcactagaagactgtcagcaggtattttcatctttctcagccttgttttctggtaaaatgggcaacaaattcacaaaccacaaggttattttgaaggttaaataaaatatcaaacaaataccattgatgacaagtacctgacacatgagagttgcttgggaaagtaagttatcttctcttttaccaatattcaagatactgtggagttgcttggcactggcagtatgagtacattctgccaacttacgtggcaagttgattaatggatatgaccattataacctggtcttagagagggttcagctaaccgttaaagatgcccagtttcactgtgcctgaagcctcccctcccactttcttggccctaaggaaaagtcctgatatccatcggttatttattttcaactcctgggattccttcccatgattacagtagtttgatctctcaatgtgacaagaaaagctgaattattgaagaaaaatctcccagtccttcaagtgtaatttttttagattaaaaggagcaaccgcatttagaatgcttatgctaaaatgtattcattgtttagttggaattcaaatgaactgggtgtcctgtaatttgtctagtaatcctacctgttctaggtttctgaaatcactgctttaaggcaggcccaatgcctttaaaccaatcactgggccccagtaagccttttatctggtaggtaagctgaataggggtggagtgtgtgtgtgtgtgtgtgtgtgtgtgtgtgtgtgtgtatgtgtgtgtgttcctattacaagtaataaatgaaaaagtcatctccattttctcaaagcagcatcaactttagaatgagaaagttgcataattgagatgagaacctaccactgtctttctgacctaggttatatacatttagcattgtacatacgtgtgcacccttctgcagtatacatctagactggcaattgacggagatatgctccaagagagcaaagcagtttctccttaagcctacttctagtctggcctgctaactacctattaatgtttttctgaaatttaaaattaaatgacactagagtgaaataagcaaccagcgattatagggaataaaaggtactctgaacacatgggagtgatgatagagtctatgcatcccaggcacaaccactgatcttccactatgcatgaataaaccttttaagactctcagctactttaaaatattttgcctttcccaaccttaaaatattttttcagatgatccctaggaaaaaacagtgtctggaaccacaagccattatgaaatccttattaagtacacatgtaggaaaggaaagtcatcaatgcatttcttggctaacacaaatgtagatcagaaagacttggagtaaaatctctgcaactttacacaaagtgaagaataccataatttgtatcaatatccatgctattcacgtgactgccctttcaccacttgagaatcgtgtaaaaatttgctcagctggaaaagaacatgacttctgaagaattttagagatgaccaaatgaaaacaaaaatttctcaaattactgtcttatgatagtgagaatgaaaaaaaaaagcacagataggaactagagccaaagatggattagaacagaaaaataaaagatgtttgaaaatgaaaatagaaaaatttccagtttctgattcaacatgtaagaagatcagaagttgtcattcccatacttatgacatgtaaaagttggacaaactaaaactcagggacttttcttggactcaccagacacctgagtttgtgaaaatgaattctgaaaaactagaggctgaaggaactgtacgtaagtactgtactctagttgataaagtactgtactctagttgataaagtacttattttccatggagatatgggttaacagttctgaaatcatatcatatatagtataattgaatgttttaagaaactgatggtagttggtggaagccagatttgttgaagtgagagtttagagatgagtaaggggaggagactagaatgatccatgtggtaattaatggagtagagttggatacaacagcatgaactcctatttagatcgacatatatatcaatgtttacatatggaaacatttatagatatgcatatatacatggaatagcatattcacatgcagatctttgccctgtcagttgagagagcctagaagcaacgacaccccagtatctatgagcacacctgtaactcagatcttggtttctaaaactattttccaatttttactggagccagggtcccttgaaaaaataagtggcttattctaggactacagcagggaatatacaagatgagctggagcagcttgccaggaaatataaaaaatgctaaaaaaatgacaatgatatgggcatgtcataatattcagaagccaactggaagagttcccaattttcaaagctggaacaatttgagcaacaaaataaagttagattggactgtaacccagtgtattaaatggaaatccatgtgcatatgttggtataaaaaatgattccataagtaaataaacgggaaaaatagacaaatctctcatgcagaaaaatttcaaataatttattttgctactccatctacataaataattgagatgaaacgtaacttcttactccttaaatgtaggctacacatagtgacttttcttccagagagcagtgtatggaaacagaaaaaaaaaaagtaacattacaattgagaaacctgacaagcacatgtcaagtaaggtgatcaaggttaatatcaacagtgataagtcatattgatatgctattataatagcactctatttctctggttttctctcagaaataaattaccctagtctagtcatgagaaaatcatcagccaagtcccgattgaggaacattctacaaaatacccaaccagtaattctcaaaagtgtcaaggtgattaaaaacaagaaatgtctgacaaactgtcataaacaaggagagcctgaggaaactattaaatgtgatgtggcattccagatgagggatttgaatagaaaaacagcattgtttaaaaactgaggaaatctgaatgaagtatagactttagttaatattgcttcagtgttgattcattcattgtgacgaacgtactgtactaatgtaagatgttgataggtgaaacttggtatggaatataagtgaaatttctctactatcttcacaataattctgtgagcctaaaactattctaaaataaaatatttaaacactacaaatagaataaagagaaaacatgtaaaccattatttatttcatcagtttacttgttttgaaaataattctgtgcttcttctatttcctgaattttataagaaataaatatgtgagaaaattcaacaaccagtactcaaccaagtcaggtgtgaagatactcacttttcatcttctttgcatcccaacataattatttcagctttagagaatgtggttttgttgaggcaaaagtatattttgaatgctgatgatgtaggtttgtgtggaattcctattaaggaatgatcaaatgatctggaaagtagcaactgtttttgagattcttatttaaagatttaaataatttcatggacattaaagtattttgtaaactatatagatttcagtataaatataaatcattgttatcgtgtatgaactcattaatttattttttcattaaaagataagcttttatacattgtcttctccacccccaccacccgccacctctctatatatatagagactggggggaagagaaccggaagaggatgtataatattctatatatatatatgtacatattttttaaccaagccctatgcactgaacagaactacaatttcagttttgaaactgtctttctgaactattttactcctcatcgggcagccccgtggaggttttactgtttaagttttacttcctatttctcctgagagtatagaatggcattgaaatggcagagccattcaaaccatctgaattgatccaatatttcaattcttccaacttttttggtgccttttaggataaggctatttctttacctatgtctgtctttcaggagcaggttcttgcatcagatcaattttgtgaactggtttgtttcacctgtgaatgagttacaggtcctgtatatcatggtccttctaggacccaccctcatcttgataaacagacgctggaggtttagatgcacctgtggatgatagaggacactcaactttgcaaatggaatgtgttgtctggaggatgccatcatagaaacatgtggttccacttagtatttagtgttttgaacagatattgaggagcaggagaccctgaaaggtctccatagtgagagtgtgccaaccagagggcatgttacttcttttttacattcagttgtctcactagcacctcaaactcaacatagccaagttgaaattatcatcctccttccatattgtcccatccccctattcctgatgaatgacatcaccatccatccattgaccaaattgcaatcgtatgagtcatctttgacacctcctcctctctctcatctgacttgcaatccccaaatccagttgattccaatgttcctaaacatctctcagagtattcaatgccatttgactcggcagggaaatgtgataaacaataaagctactgtaacagcttactaatattgaccaaaggtcatccccttccaatccattctccacagaacaaagccattctaaaatacaaagatgatcatgccacttcctgcaatctcccagccatgcccattgtatgactcctatgctgaatgactttaagtttctttaatattacatgctctctttcccactgtgggttctacagatgctgtttgctgtgtctgaaacatcctactgttcctctctccacttaccaactaagctttcatctttcatcctccacctaatctctactctcctttcaggatcatcagaggtattacctcttacaaatatctttccctgccttccaaatcctgtctccaaagcctggattatgtacttattataggttcccacattgcactcagtacattgtctccaccctctactagcttggaaaaatctgcgagagcaagaagtatgtctgttcatgttagagttacctctaatgcctgacttgatacctgacaacatagtgttgctcaatcaataattgtaaatacctgaattattaatgcatgaataaataaatgatttggtaaatatacaaatgtatgtattaaaaacaggagagaaagaaatggaaatatttgtataaccagaacatcaggcaattagcattaggaaagctttttttttcttgtttaagtaggttaaaacaggccttaaaagacaaaaaatcgtggaacattaagatctctctcctttcccccctcctccttctacctgtgtgtgtgtgtgcacgcatatgtgcacttgttaaaggtagagagagggccgggcacagaggtcaggtgggcgggttgcttgaggttaggagttcaagaccagcctggccaacatggtgaaaccccatctctactaaaaaatacaaaaattagctgggcatggtggcaggcacctgtcatcccagctactcaggaggctgagacacgagaattgcttgaagccaggaggcagtgagccgagatcatgccagtgtactccagcctgggcaacatagcgagactgtctcaaaaaaaaaaaaaaaaaaaaaaaggtagaaagagatggtgagagaaaattgttggcaagattccagtttctttccactagaaggcagaaagcactaaacaaatgtcaaggcagggacctaggtttccagaacccaaaaggagcattgggagtttgtcactgagacctcagaggcagagcccaagaccagaaccgaactattactatgcggacttgatgttcaatgaatcaatcgcctaagtatccctaaatgctccactaccctgtgcctctctacaaaccccattataattcattcccaagccatgatcagaattggctcatcagtttgtgcggtggtaatgaggaaggggtaggaagttgggattcagtgggtctaccataaggcagaagaggaagcaaatcagacacattccaatgatattatctgtttggttttgcccatatctgattttcgaagtcttctatgtactgaaatcaaatatctcacattaaaaaaaaaaaaaagcttttaaagattgtaggttgacacagcatagaatatcccttccttcttctagaccagtagcattcaaagctacctggtagtgtaattaagattttacatatttcaagcttcttcactgtaactcacagcagcttggaaggtaggagtaagcttcatgacaatgatcctctgcattttgatgggtacaagctgttctttgatatcatggacaccccagcttttcaaaagaagattcttggctgtttagcagttcagccaatccatgtaattgctttttccatgttacataagagtaaaagtctcctataattatagggataaaagagacttgatactttccagatcaccagagcaggaagaaagaagaaaagcatgactttttggagtgattactcatcacatgccagacacaatgctgaaaactttgtatccatcatatttttatgccacgaaaaccctgtacagaagacataagcacccccattttacagatgagggccctgagactaggggaagacaaagaattcctcaaagttagtttacttagtacaaattagaattggtctttaaactgactccaaggaggatggccttttttactctaccacatcccctctccaacactattggtttgattttctgttacagaagtacaggaagacagtgtttcttttctagctatgcaacaatgacatgtggtggttgaaagcatggcctctggagccagactgcctgtgaccatttactttttcttgaacttgaacttatactttagtttctctgtgccctaatcttctcaagtgcaactggggttaataatggtcccagcactgttgaaaggactaaatgactttgcacctataaagagctttgtattttaagtgctccataaatattcatgttgtagttgtcattgctattgttgttgtctgtgaggccttttcacagaggcatggcctcgcagaatagggacaagcatgctttaatgctactcctgtcttcttaattcccagtagcagaaaaactggaagactcctttgccaagggttattattttttaatcaatctacgtagggtttatacatagatgatgacagagagaggtaggtacagttatttatagcctgtgagtcattatgaaaagtcactctttctttgcttggtcagagcagtgagaatacatatatctgcaactccatgtgtgtagaactagcagcttaaactggaaagatgacctattgccttagtctttcccagagagaggcttgccctacacccccttttgcagcctgcccaggctaatgcaactagcgatggcaaggcaagcagggcaggctgccatgcattttaggggatttgagcagtcaggcagatcattcagggagagattgttttaaaggtttagctaaaagccatttatccacctcatttcaagcacagtattggctccaaagtacagttggtcctccatatccatgggttctgcatccatggattcaaccaactatggatagaaaatatttggaaaagaaaactccaccaagttccaaaaaacgaaacttgaatttgccatatgccaaatatatcaaatccacgctaatgaagtgatgtgtaggcattgtattaggtattataagtaattcaggaatgattgaaagtatataggaggatatgtgtaggctataggcaaataacacaccttgttgtataagagactttagtagccttcaagtttggtatctacaggggatcctggaatcaatccccaagcatatccagggacaactgtgctatattgtgatgaagttccaccacttagctttatagctgaggactacaagctccaattatcttagggaatattctggtgaccaaataaataaaaactttctaaaaagtgatagtcacttgagcatccaagaagtatctatcacatccttaagtcattccattttcctttatatctctctgggtgagccatcttgtcctgaatacaatttgtaatgccgggtaattacttcctgacagaaatttcttcccatttcattctctgtgtgttaagctcatttgattacaacaaacaaaacaaaattcagggacattgattaatgcaataagagcaaaataagtaattaaaattaacaagtttctaactttgaggcctggcctctctcacagagtctgtggcaatattaaagtgtgattctagcagaataaaaacagttcttgtctcctgaaatgtgaataatcctcagtagatctgcctttggattggacatccattgaacatgtctcaactgcactgtgtctctttgtctttattttctttatctttgggtcattcccccaattctaactgacctttgttatccttctggtctccagtttagttttctgggaagggctctccctggctcagttcctcagcaccatcactacttgagcagagcttttccacctgaagtgctcaaaggactgcccatctgtccttgctcagggacccccaacacggactgcaaggctttagaagttgaatccccagcacagagctctaatcataggtgccgcagaggccttgtctccttgctggtgctgaagggtggtggcttccatagcctgacagtctctttatttacccagcacaataaaggaactaacattattcttgtggcaattcaaaaaaatacttaaaaattagtttgagacattatttaaatttttattatacatcccctgacaaaataatttttatttatggaatgtatttttttattttactttaagttctgggatacatgtgtagaacatgcaggtttgttacataggtatacacgggctatggtggtttgctgcacctatcaacctgtcatcattatttctcctaatgctatccctcccctggcccccaccccctgacaggccctggtgtgtgatgttccccttcctgtgtccatgtgttctcattgttcaactcccacttatgagtgagagcatgtgctgtttggttttctgttcctgtattagtttgctgagaatgatggtttccagcttcatccatgtccctgcaaaggacatgaactcatcctttcatatggctgcatagtattccacagtgtatatgtgccacattttctttatgcagtctatcattgatgagcatttgggtttgttccaagtctttgctattgtgaacagtgctgcaataaacatacgtgtgcgtgtgtctttatagtagagtgatttataatcctttggctatatacccagtactgggatggttgggtcaaatggtatttctgtttctagatccttgaggaatcaccacactgtcatccacaatggttgaactaatttatactcccaccaacagtgtaaaagcattcctgtgtctccatatcctctccagcatctgttgtttcctaactttttaatgattgccattctaactggtatgagattgtatctcattgcagttttgatttgcatttctctaatgaccagtgatgatgagctttttttcatatgtttgctggctatataaatgtcttctgttgaggagtgtctgttcatatcctttgcctactttttgatgggtttttttttcttgtaaatttgtttaagttatttgtagattctgcatattagtgctttgtcagatggatagattgcaaaaattttttcccattctataggttgcctgttcactctgatgatagtttattttgctgtgcagaagctctttagtttagttagatcccatttgtcaattttggcttttgctgccattgcttttggtgttttagtcatgaagtctttgcccatgcctatgtcctggatggtattgcctaggttttcttctagggtttttatagttttaggtcttaagtttaagtctttaatccatcttgagttaatttttgtataaggtgtaatgaaggggtccagtttcagtttttctgcatatggctagccagttctcccaacaccatttatttttatctatttcagggatcagcaggtttttttttttttaaaagtaaatctcaaacttgttcaaagagtaaatatctaggctttgttgacttttactcaagtctgctattgtagtacaaaagcaaccatagacaatacaaacaaatagatgtggctgtactccaataaaactttatttacaaaagcagctgtgtttggcccctgggctgtaatctgtggagcctgatctttcccagtgcatgtgtacccatgctgtgctcacaccccctcacactccatacccattttgtacatctgtgttcctttgttgcctatattgcatagctcactaatctgagaaggctggatttcaccgaattgcatgggagtcccactgttgtcaagacactcatggtctgttaagtggaggaaaaacatgaactatctataggagaaccaatgtctcagaatcatcaacaaatgcatgcatttgggagaaatttctagtattctaaaatggatcgttttatcctagaaatggtgagaatggcactctcatcacacaaagcacacatatctgcttaggtacagacatttgctgaatccgaattataatgtcctcttctgccaaccctgtaagatgctcacatgctaatggtaggggtggaggaatggtatgaaacatgaaatatcttctgctttgacaactgtcttaactctgttgttctctcctaaaatgaagttgtgctttgagccactctatctaaaactaggctgtcatttctatgtcctaagggatgcaagtaccgttttacctttcagaaagcaaattttaaaacaatccccaggtataagatttatctttccgagcagaggatctgcaaacagtgcctgcggacgtgtttactggttaaattttattccaactatgagctactaagtcttccagcaattgttctttcttaacaagtttgtcttccttggtgactgatggtttctacttgttcacttgatcagtgtagcatttgattccaacagaaatgtgcagtggctcacccctgtaatcccagcactttgggaggccgaggcaagaggatcacttgaggtcaggagttcaataccagccaatgtggtgaaaccccatgtctactaaaaatacaaaaattagccaggcatggtggttggcacctgtaatcacagctatggtggctgaggcaggagaattgcttgaaggtgggaggcagaggttgcagtgagccgagattgtgccactgcactccagcctgggagacagaccgagactccatctcaaaaaaaaaaaaaaaggaaaaagaaaaaaaatgaatctttataatatacaacacaaagagggattttgatgggcttttagttctcgcagacccccctgctgggttgcctaaacttgtagtggcaatagagcatccagaatatctgcccatttcttccttaggtacatgagcttccctgtggctttagatcgttcataattgttgggttcatccaggagtgtcactttgtgaactttttctcaaggtaataacatgtgtgagtagcacgaggcattaaaagaaagaagagagatgggagtgtcctttagatgtcctcagtactgttgttagaacctgcacaccagttttttattcacagtttccccttgtgtggcaatttatttgcagtgtagctggtaatatttgtgacatagaatatgttatgctatgacgtacctactatggttagcatagtggtggaatttaagaagggatatttaattaatagaatttataaacaggactatctgtcttcagagacacttcagggataacgataaacttcagagatactgagaattgcaaggggatctcagtctaatgacttttgagtgccttttcggatgtgaacaaacccagcaatagggtggataatatgccttaactgggtccccaagatacttgattgtgtatattgtctggatgttcaggaacacatggtcttaatttcttagatgtctctattgtgtgtgccagtttagagttcagtctgggtgcatttatgttatatagttttttccatattttcttttagggtataggaacaaaacagtcagcaaaactgccaaggtgcttgcagatcaaagtgaagataaaaaatgagtggagtgattgcaacacaaggtgacacttgatccaatggaggttactttcactggctttcctagaagctcatactgggaaccccatctatgggactcgtggtgggtggtgggggatgacagaaaacttcctcttcatgaaaatcttaggtctaaatgacatgcttatagtttggtggatggattgagagaagcagggaggcctttccaggcagaaggaacaaaatgtactgtcatttggaagtgacagcaggatgcactgacaggagcctggagcagagtataggaggcgatggcaaaaagaaagactcacaggttaagacaggcccagggcatgaaggacaagcagccactgcacacatcccctccactaactgctttgttctgctccctcttgcagtaccaatactatccaatttttgtctatactagaaatttgggagccatgcccgatccaatttccttcatatcacccatttactccatcagcaggaatagaaagcttaccaactttatttacatattcatccatcctttattgataaaataaatttatttttgagatactttccatctgacttcaaggttaaataaatgttaatgaaggaggtaatgaagcaagacatgcttgaactttggagccagacacaatttgggttggaatcttgcctctacctttcaccttctgagtatataaccttgggaagctgtcttgggatcttcagacctcagaaaagagcacaaagaagttaattatatgttcctcagagtacctgccacagaattattaaatattcaatagtggaaattcctatatcctcacttctccttctagttttcatttctctcctgaaacttcgttcattgcattttgaaaccttcattgactcttctattggattttgaggtccttgagggccaaggttattgttagggcttttttgttttgctttgttgttgttttttaataaaacactttctgtgtttatgtttctagttttgctcagttttggtttgcacgggagtctcctgcagtctgccgtctgagtgcaagagggaggatgaatgatatccctttcagcttcctcaggtgtggggaaaagattaggaaaagagcaaacatttatggcaatctggagttacagcatgtgtttgagtcccaggtattttcctcatacatcgtttagcctctttgagcttttgtttcttcatttgtgaaatgaagataaaattcttctaccttatctggcctataggatcatccctggatatttgccttgaacagtttacagtcttagctcccacctgcccatgggaaggaccacagggatcttgtgcagcatccccaaatcttctgcagcagcactccaagttccatctccttctctccattccttcacctgctttccgacaggtttcattctgtggccagtactttgttttcctctctatggcggctgtttgaaatttaggattccgtaggacagccttcttactttgcaattctgacctcaccgctacacaccatagttcacattaccctcaccttcattaatgtctctaacagcaacaatacaaattgagtaaattcaatttagggtgattgagatgtcacctgtttttattctttccataaattcaagcaagatatgttaacaattgttcggatgtcataatgttatgctagaagttattgggctctttaattgaatgttctcttaatttgggcattggtaaggtaccaatttgagtatgcagacttgatagctgggtttgccaccaccctgagctagtagtgtatgtggatggcataaagaacatgttggatctttccacctctgactggggctctctgtggccagcatccaactcagcaggatcagatgattccggaaacactgactgcttctctcctgcaagctcacagtggagcgtctggcactccctgagatccctgccctgcatggctttttacacaaactgaacaaatcacattctctaaatgagagaagtgcagctctgttacatttcaatcttctaaagaggaggaaggtcactcgtcagagaccttgtggtcatcagcaaatagggtgatccaggatgaagacacacaggcagtaaatgacggtttcttcctcctctcccttctcctcctttccccttgatatccagtcttatcttctcccttcctttctaactctccttttccaatctgttcttcactcgcctttcttctcttctcttctttcccttcttctctccctctttattcttcttccagaaatctttaaatgagtcatgattcaagtgaaaaaagattcttagctaactcacatatggaagcagcaaattttctcagattttgagctccttgaaagctgagcagcataggagccttcacaaccctgtagtccaggcagcagtagaggcatttctctccagttcctgggaatctcatccgacagtcaacttgtgttgacagagtgagtaggactgtggcttttatttatttatttatttatttatttgcatctggatcttgggaagtaagcatgtggcataagctgggtttcttacattgccctaagtcattgtcacaagtagaaagaagtatggttgtacctctgctgcacaaccactcaggcaactgttcctaatgtcttctctgaggccttctttgtcacttcccaagtctcaggtatgggcaaattatcctctatcctaccccattatatttgaattccaatttgctcgtagttcattaacacctaccacactatttcctatttattttgtgtccattcgccagctagattgcagaagttgtgtaattgtgcctcattcgtctttatagccaaagtataatcctagaacagtttctaatgtcagatgcatcagggaacccaataaatgtagatggtaacgttatgctaatcttacattttaattctattagtggtgaaatctttatgacttagtcctgtgagttgcattgaaagattgatctaagcacctcttttgtgttggaaaggagatatattttcaaaatttttaaatattaatacatttttagcatggcatatgatcgttttgaaatacttatttcaatatcccatgttctaaaatagagtgtattaacagaaattttgagatgtggtaaggccaactgatcatgaaatgattgccattgaaaagataatggtcttgagtatggaatcccaaaaaaggaggtaaatgggggtctgggctctggattgggttggtttttatttgaaaagtgtgtgctcgggcaatttattttctatctctaggaactggttagtcctgagaggggaaattccttcagggtcaggaagaaccagatatcaaagaatcagaaatacaaaataaaagatagacttaatgcagcttatgatgccaaaagagattcacttttctctaaacatgaatgggcatgtagaaaaaacagcaatctctacagctgtctgggtacaattgctgtcacaagaactattgccataatgcggttaggacataaagtaaacttaaatactctacatactttttataattggaggttgtctacatagacacagtagagacttgagaagtccccagagaccttaaaattctattcagttcagctgtaaccgtatcctccaatcaccttgtgggtcatgtatggattgtcttgcttctgcatttatcttccagagatttgctgcttttactaattattggagtagcagacacctctattgcttctgcctctcttgaactatgattgttcttatctctgggtactaagtccatcatccttagatcctgtagagcactggctgctgaggcacacttatcaccaaacgcctgttggtgtcactacagagtaggaaccaaattgctctcactgctggatgacaacttgtttctcatctagcatcctaacttatctggtaaggaaatggataactgcagtatataattattgtgtatcagtaattaactcctcctgccctctgtttaggtaaaagagatgaggcttaaaaggcgcacaatttttaaatgtcaaaagtatcacttgactcaaatctttctgaacttagcacttacaaacttttcagtggaccacaatgtccaacattaaatgctggaaatcaccataccgtgggtttgtaaaacaggccaatattttttttatggatacttttaaggtccatcctagaggcctatttatataaacacttcatgccttactctgggaacttatcactaagattttcttcaaagacctggtgaatcaggattttccattcatatctgtgaattaaggatacctgggggtaatctctgtcactgaatacatcaatatatttgccagttagacctcttctttgctggagaatgctgacttgcactttttgtataggtaaggtttatcaacaagatttgtacaaggtcaagattgggagagctgttagtctgagaaatgccaaatatcagaatggggaagaacgagatcgtctctagaactcctagttactcagaggcattttatttcatttctttcatatgatttcttctttctttctttgttgtcttttccacacaccttacagatgatcagtattctatttaaaatgtacttaccacaagtacacaaggctctttatctcaacagtgattatagttaggcaatagtagaaataaaataaatgtccatatgactttaccatatgacagaatattctgcagccacttaaaaggatgagatagacctatgagcactaacataaacaacgcccatgacttattacaagttttagaaaacaggtaatctattatttataatagcaaaaaatgataacagtaattctatgttattatttttctctttttttttaaacggagtctcgctctgtcacccaggctggagtgcagagtgcagtggcgcgatctcagctaactgaaacctctgcctcctgggttcaagcgattctcctgtctcaacctcccatgtagctgggactacaggtgcgtgccaccacgcctggataatttttttttatttttaatagaaacaatgataaatgagccatagctacctgcaacaacatattgaatcttataacataatactgagcaaaaaaaaaaaatctagacatataaagaacatatggtatgattctatttacataaagatcaaaaatagatacaactagcttttggtattagatgtcagtttaatagttacatgggtagagaaggtggctagtaattaggaagcagtgtatacaggggtatggatcatattccatttcttggtctgagcattgagtacctatgtgtgttcattttgtaaaattttctcacagtgtaaatttatgaattatgcatttttgttatgtattaacctttaaagtttattgtaaagggcaggaatttgaattttgaaaaaataaaagattgtgatgtttcacaacatggacagtaatgaaaggatattcttaggtgaagtaagagatgtggttcagcaagaccatgtgcaagtcagattccaggggaactagaaaccatgagcatgggtgaaactgaagacattattaagtaaaataagccaggcaaagcaagacaaataccacatgatatatggaatctaaaaaaagctgttctcatggaaattgagaatagaatgatggttatgagaggccatagggtttagggggaagatggggtcggggagatgttggtcaaataatacatatctgcagttggatagaaggaataagttcaagagacctattgtgcagcagggcagctatagtcaatgatgatattttgtattgttgaaaaatgcccatagagtgtatattcagtcttttccccacaaaaatgataaccatgtgaggtaatgtgtttgttaatcagctcgatttaaccattccacaatgtatatatacttcaaaacattgtacacaataaacacatataatttcatatgtcaatttaaaaataagtaaatatatttaaaaaaattaaaaagacactatgagcaagtagaggaagacaactgttaaacataggagtaggttacaaagcaggcagtggaggggcagggataacaaaatctccaagaagaggggtgagccatgctattggatttccatctgtagtttacatatatccttaagataaatctttgaaaaatcaagttaaaatgaattaagttgaatattatcagcactgatatttataaaagagattatatatttattattgctgtgactatcattattatgattcgtggagcatcagtatgactctgtacctgaaactaatgagtttgactacaacactcttttaattcttcatttttcttatgcacttgaggaattggaaattgttttcaaatagtttacatgttacctctcaaattcagtttttacaatgggttctatgatatattaaaataatggtaataatatagtagaaaccaattatattttattaacactggaagtgagccagacactgtgctcagtaaatgcatggtacaaagcatctcatttaatcttccagtgacccagtaggcagatattatgatcatcaccacatttcacatcaaaaactgagtcatagacaggttaaataaaattgccgaaagtcaggtaaatagagcgagaccctgggaacagatctgtgctttccgactatcagtctgcactattcaacgtggtagccacaaacatgtgatggtcattaaaagaaaaactggagaaaagttaaatttaacagactttaatagagcaatttgtgaaggggtagccctctgcaccaaattacattcagagtgactttggcactgccggaaggtgtaagagaatttacggaagcagggaatttatgggagaagggaaagtggcctacagaaaacagaagtgaggtacagaaacagctggttatagtaactcggcattcatttgaacacagtttgaacagttgactgactgtgattagctgaaactcagtgattggtacaggagtaggttacagtctatttgggcatattgttaggttaaaattcactatgtacagagaaaccattagaccaaacttagaatctgtaaggaggcagttttagggtaaaatcagcacagttgaacacttgaaacatggctagcctgaaatgagctgtaagtctcatatacggtaagtctcatataaaaagccccactggatttcaaagacttagcgccaaaacaatataaaatatttcattaatattttatagctattctgtattgaagtgatactattttatatatgttgggtcaaataaaatgtataattaaagcgaatttctcccttgattgactgattgattgattggattgcttctacggtgcctactagaaagctttggaagctgaaattatacatgtggcttgcattatatttctgttggatcatgctggtccagactggatgctctacttctagacctgaggttttcaacttcagcgctttaggtagatttgaacgtacacagatctagcttcctagtgctggaaattcagatctgctctgggctggggttcagttgttggtgtatttgagaagctcccgaggtgtttctaatgtatagccagaggagagaacccctgcctggagtccatatgcctgctctatgcagtctgatatccacctgactcgagacagctcctgatgggatagttacaacttaagcctgggaagtcaaatagccacagggctctcagcctgcgcacctatgcaaagagctgactttgctgattatgtttgtagatcttccaggatcactgccaatacctgtggtaaaggagttagattcctttagcttacacctcatctgtctgagagaagtgaagccccattacaccaatatggagaaggttgtgtgttaccttggtcctgaatgttctgtgaagcaaagttaaacggtctttagtgggttagaatccctactccatctaaataggtcacagctagaagattcccttaaaccgctgggtcagattctccctgttgtcaagaaaatgaaatgttattgttccaagtcacatgtcttgctcctagaatgtgactttgccaatgaacagtgaatcctaagtgataaaacctagaattgagggtaaggagtgggggacagctattataggttcaggaaaaatggagttaacagatcttttaaaagtgaactcggacaccacagactgggattatcttagcattgaaaactcactggtagatataacttgatgcaggttgctttttacttataatttatttgtggaagaaatagcacttggaaagccagtgcatattagacatattaatgagaagacccagggcttttcattttcttttcaaaatatgtcttataacattcacttatctatagtcagccagagatgcactgtttgtgaaaggaggggaggagataagcggttattacaggaaaggtttatatttggtgggggtgcaggggaagaaaggaaaatgacaggctgagaatacagatgtttatgaatttaaactgttatttacccttaaatatcaactttaactgataatgcacatctaaaagcattttgcgtagaaataagataaactatagagtatcaacattattataaagtaattatttcagtttttcctttgttgttgttgttgtttgttgttgttgttattggttttttgttgttgttgttgttgtttgagacggagcctccctctgtcacccaggctggagtgcagtggtgcaatctgctcactgcaagctccgcctcccgggttcacgcctttctcctgcctcagccttccgagtagctgggactacaggcgcccaccaccacgccctgctaatttttcgtatttttagtagagatggggtttcatcgtgttagccaggatggtctccatctcctgacctcgtgatccacccgcctcggcctcccgaagtgctgagattacgggtgtgagccacggcgccccacctttcaatgtttttttaagtgtagtattatgcagttgactgcaaagagcaagaaaatgaatccctagggtaaatgtaactttctacctcctcccccacctcaagaaattgctgcctctttttattgccccaccaagcagaagaccactggtaaatgtccttagacatccagctcagaagctattgagttcaccagaggcttttgtagtgaggccctagtgcacagccagcattagccacatacaactatccagaaataaagatcatatccttgtccttgaggggcttttgagaaatgggtatgtgcatttttggtacaagaccatgcagttatggaaaaggtgcaaaaggaatgcagaagggaagcttgggaagaattttcaggcttaatagtatttattctgagcttttagggatcggtgggcagattaacttgctagggctgctgtaacaaagcaccacaaactggtggctcacacaattcttttgttttccagttcttatcgaggtattagcagacttggtttcttctgagggctgtgaaggggtaactctttcttgcctctttcttagcttctggtaattggctgtcactctttgatgttcctaagcttgtagaatcattgccctaatctctgacttcatctttagatgatgttctccctatgtgtgtatgtgtctatctctgtgtccaaatttctccttttactaaggacacagtaatattggattaggatccattttcatgacctcatcttaacttgatcctcttcaaagaccctttcttagtccatctgggctgcataacaaagtaccctacactgcatagcttataaacaacaggcatttatttgtcagttctggaggctgggaagaccagggtcaagatgccagtaaattgggtgtttggtgaaagctcagtctctgcttcataaatgatgccttcttgttgtaccctcacatggtagaaggggcagggagcttccttgagtttattttataagagcagtaatcctatctgtgagggtggagccctcatgacttacccacttcccaaaagccccacctcttaatatgattccatagggcattaggtactaacatatgcattttgggggcacaccaatattcagaccatagcagacgctatactcaaataaggtcatatgcatatagctactggagtcattacttcaacatcttttggaagacaaaattcaatccataacagtgggagtttcaagtagaaaaagggaaggtgcttctagcctgaataacacagtgtaaaagacatggagccttttagtacctcctggtcatctcagcttctctgcacttggatggtgggactggaggccccccacccccaggcagctttctcagggttgcttgtagcaaggctcagggagctggttctgtcttcctgatattcttattatatgcccaccctgccagggtgccaccctctgtaactgccccaccctgccagtgtatgtttgatctcattgatctcatggtaaggattccttttatttgccttcaggctctcttttaactaaatgaaatacttgtttaaggcatttataaggccattgaactctttgttcatttttatctgcaagttaaaaaaagcatatcctgatttctaaacattctaaatattctccttttcattctcttttctgatcaaggttcatttgcaactgcttataagctcctaatattttaatctatcccaagcatttgttgatttttaaaaataaaattcaggagacctgctttatctaacaataattaatgctggattaaatgcacttaaacttaatccagttaaaatgaggacaaaaaagtcagagtgcaaccattagggagagactgacctacacagatgatgaggttggtttgatggatagaaataaatactagaattaggcagggagaaatgctggagtgaagactcatttcataaatagtgggttcgttattgaatattgttgtattatgatgacttttgcttctctatgtagactcttaacttcagggcctcagataatgaatacttggatagaaaggagcctctgaggtatagttggttgatttttagaatgactataagagtaatcatgcttcattttgatacctagtggcaacacataggatctgatttgcatatcttgagtatgcgggtttccaggtgaaacttttgcttacttatatgacatataggtttgtgtgtgtgtgtgtgtgtgtgtgtgtgtgcttcaacctcacactacttgaagatcagcacatttatggacatcatagttgagctcagtgtcttttaggccaccctaaaaatggtggtacaaaggaaatgttctcaagaagcactagaatcctaggtccctatacctggaggggatatggaggtgccatttagaacagttcctgttccctcacacatgtaggagatcatgctgtatcatggtctcccacacctctgtcctccatacagagatctctctggggaaatagtgtaacaagaactatgactgtgattttctttcggtagcattcttttttctacgtagtacagcttaacaagtttctatggagagactttgagaattttatactgttgcagtttccaaaagaattaccataaggctgtgttacacatctggatctgaactatggctgcccagttaagtagatatcatgctagccaataagtgttccaaggattctgtgtctccaaggacaaagagcacaatttatttttcttaaagggagaagtgagggagagtatgaaactagagaaagtaacattatggtgaaatttcagaacccagcattagaacagtggagagaatctttttggcaggcagcctggcctgagccttgcccttgcccttgccctggactcatctcactccaggactcatctcactccaggagcagaatgcatggttgttgcatgcgtctgtttcaccaccagctgtaactgctcttatcctcttatccattgtctttaccaagaaaatggaagaaatactacacacttcctatttgtttatctgtgagggagagtgtgaaagacagagcccattccccaaagaggtctgcttgtattacatccctcaaaatttctgggcaggaaattcaaaaccacaattgagaaatatagttaccaagagtgaaagtacaagttaaaaaaaatgagttaaaaaaaaaagacataaaaataaattccttaaataccagtttctggacacagacttctccagagttagcaagtcactgactgcctgtggctaaggctagttttgcatatgggagtagaatattttaaaggttctttttgacttaatgctgcttcaagagaaaacggaaaaaggaaagaaactggcgttttgtgcatcatttatatgccatgtattattctaggcactttgttcgtgcttatgtgtttaatccctaaacatgcaggtatgcaatgtttttctattttattggtaaggacaatgaataagaggataagaacagttgcagctgatggtaaaagtcaggcatgcataaccacggaccacactgctccttgagtggagttggctcagggtaaggggtgatcttagccaggccacccttggtggcatggctcaatccaagttcaaaggcctcagaaccagggaagccaatgatgtgattctcagtctgaggccaaaggcttgagaacccaaggtcattgatttaagttatagggtccaaaggccagggaacctggaatttttgtccaagaacaggaaaggaggagtatatctcagttcaacaaatagatcaacatatttgcattttctctcattttgttctcttcaggatcccagaagatgggatggtgcctgcccatattgaagtcagattttccccatctagtccacttagatgaacatgctaatgtcctctgaaaacatctacacagacataccccaaaataatgctttattaggtttctaggtattccatgttccagtcaagttgacacctaaaattagccatcacacaggggggaaaaattttaaaatatagaaagatgaaaaaccagaatttatcgaattactatgtgctatatgcttaagaaaccttacttgatatcattctcattataaacatacttgatattgcctttatgtagggaggaaattgaagtttataaaggtaaagtagcatacttgcagtcactcattttaaaagtgaccaaaattaaagtcaaatccaaaattaccagactctcagccccttgatttatgctggttctcgcataataccctatgaatcaaatgcactgataatataccatcattgtagctacacctgggtctataaattcacttgtagtctttgtagttttaatttcactcttgatttaaactcagaacctttttttatttttgcatgtccccaggctacatttgactagcttcaagtaaaaaacaaaacaaaacaaaaaacatactgcataaatgttatgtggaaataattcatttttgtgagtgcagtcttatgtttttgtttgttttagtgggcattattctccataatttttataattctttttatttgcagaagcagggtagacagattattatacgcaagtcatgcttattccatttcagtcatgaactgacaattaagtaaaatggaattcttaagagttggcacaaatatttatttgtttccaagttcaactggaaaatttaatgaacttgcaaatgtgggggtggaaaggatgacattttttaagatgatgatatgcctaaacaggtcttaataatacatgttttatcccttcaatttgaatctttccaactttaaaatgtcaacccaagcctgctggggcacatgattgcccctctcgacttactaagaaatgtagacaatgtgatattttttaggtttactttctgttttctattatgccagcccaaataaatgcattaaaaacaaaaataaaccctaagaagagagaaaatgttcgaaaacatttgttcccaacataattccacaggaaaaagtattagaaaacatgaggtcatatcttaagagaggatatagtgcatggtctcagaaaatagaagaaataaaggaaaataggtcctagaatgtgggctctctacatgtaggttttgatccagatttgtttcatcaggcttccatttgcttattaatgataaagtactgcaagtacctttactggtagagaaacaccacaagtccccatggactaatttcagctgaccctggaagcttctgcagcattttgggagcaccccagaaagtcacggtatgaagaattttgtgtacctgagccacccctcagcttgcttttctgtctttgaattgccatcagcaccaaatgaagctagtctagaatataaaaccaggcagcataccagtgtcagcattagagtatgttggttggaacagcacacaaatccaacacagagataaacaatcagaatacctacatatcagttgatcatgctgctcatcctctgaggccagggtacaagtgctttcaccattttccttatggttctttgtgctgtgaaaaggactttgtgagtgcagaatcacagtgaggagaccaaggttggatgaaaagtcccctgttttagcctataactgaataccacaaaatgggtactttattttgaaaaaagaaatttatttggttcatgtttctggaggctgggaagtccaaaagcatagcgccagcatctggtgagggcagttctatggcagaagggggaaggcaagtgagctcaggagacagagagaggaaattgagctgaattcatcctcttatcagaagcccactcttgtgataactaaccccctcctgtgataactaaccccctcctgtgataactagtttactctcatgataacagtattaatcccttcatgagtggagccttcattgcctaatcacctcataaaggccccacttcttagtactgttacaatgactattcaatttccaacacaggaactttgaggaacatattgaaaccatagcagctccaaatggagaagctgggtacagagtttggatgtgggtggggtcagaagcagatggtcaactcacgaaaggaggatgtgtttaagcctaggagtacctgatatcaacatggacagattctaagccttaagaacactctggggtgagaattgatgtaacatgaacaattctgtaaagacagaaatatgcatttgttaattcaagtaacaagtctgaagtgtcaatgatgtgggaattgctgcactaggtgctgaggagataatgatgagccaaatgagtaaattaatgaagaatatggtcccctgaatcagtggagcttactgtgcaaggctttttgatagtgcaaggctctttgaactagtgacatttaatttgagatttaaaaaaaaaaaaaaaaagtggagtggtcctttaaaagacaagcagaaggcgtggagcattggctcgcgcctgtaatcccagcactttggaaggccaaggtgggtggatcacaaggtcaagagatcgagactagcctggccaagattgtgaaacccggtctctactaaaaacacaaaaattagctgggcatggtggcacgcacctgtagtcccagctgctcgggaggctgaggcaggaaaatcgcttgaacccaagacagggatgttgcagtgagctgagaccataccactgcactccaggctggtgacagagcaggactctgcctcaaaaaaaaaaagccagcagaagaataaagcaaacagcatgtttcaagactctaaggactgaaatggtagacataacagaaaaaaaggagagtggttgatatgggtgagcagtgtcatatcaggcaggtctttcagaccatactaagaattttaggtattataagtcaaataggaacctaataacacagtaaaaatagaatatacacacatattcattcatatacatgcatatatatgatttaatttatatattaaaaggtttatattgcctgctacatggagaatggtttatgggagtataatcataaaagaagactaaaagataaaaagctatgtattattttatattctgcatattcgacatattctttgcatattctttgtattcttttgtaccctaggattaatatttttgcagctatagttgacataagataagccacctgtttataatgtatcactagatacatttttgacataagtattcaccagtgaaaccaccactgtaattgagacgattaacatgtctgtaactcccaaaagtttccccacatcaatttgtaatctctcctatcagtccctactcctgtccccaggtatctacatacatgttttatgttattatagtttccattgtctagaattttgaataagtggaattatacaacatgtaccctgtttgctgtctgatttattgcactcagcatatttattctgatattcttccatattgtagtttctatcaatagttcatttctttttactgctgagtactatttcattatatagaaatgtaataatttgattatccatttacctgttgatggatccttgggttatttccagtttggggggctattaaaaataaagtttctatgaacattgggtacccagtgaaattgaactttcaatagttgttggtaatggaatggcgagatcataaagtaggtatatttttaattttctgtgaagctactattggaaatggctatataattttacctttccatcagaagtacatgagagttctagttgttcacatccttttcacatttggtatggtaagtctttaatctcacctattctagcgggggtgccatatatctcattataatttaatttgcaatttaataataatgaacaatgttgggtatctttttaggtacttatttgtcatccagatatctttggggaagtgtctattcaactatgttttgctcacatttaaattggtttgcttatcttattattgagaagtcattcttataaattaaagatacaagtccattgttgaatacatattttgcaattttttcagactgtatcttgccttttgattttcataatggtgtctttgaagagcaaatgttaatgttgatagataaagtccattttattgattttgaaatattttctagtttgtagcttttatattttagttaagaaatctttgccaaatccatggcactaagattttttcctatgttttcttctaattttgtagtttaaactttacatttacatctatcatcctttttgagtgtatatatgtatagagtatgagattaggatccaggttcatttttgtggatatggctatatatactattgatgcaatgtcattttttgaaaatattctttcaccattgaattatgttggcatctttgtcaaaaccaattggccacataagtttcgaatattatatttcagaacgcttttatctgttgcaattatttatttgtctataattaggccaataccatatgccttgattactacagctttataagaaatcttgaaataaagtcatgagattccacaactttgttctcttggctacaggaacgttgttttggctactgtagatcttttgtatttccataaaacatttagaattggcttgtcaacttctgtgacaagaacaacaaaaacaaaaatgcttcctgagattttaatagcattgcaatcaatctgtctatcatcttggggagaattgacatcttaataatatcaagccttctaatccataaacatgttatatctatttatttagatcttcttttaagcttttcaatgtacaagacttgtgtgccttttgttaaattgatctctatgtattttacatgctttgatgctattgtaaatgacatttttgtttcaatttttctttgttgctgtaaaatgatgtacatttatttttgtatctctctcctataaccttgtatcctgaaattttcctaagcttacttgataattatactaggtcttctgtagattccatcagcttttctgtataaattgtcatgttgtttgcaaacaaagacaacttttcttctactttccccagctgaatgatttttattcctattttttcttgttacattaactaaacctctggtacagtgttgaccagaaggtatgagagtggatattcttgctttattcctgatcttagggaaaaaaacattctttcacagctagatatagattttttatagctactctttattaggttgaggaagtgccttctatttctaggttttgagagttttaatcaagaatgaatattaagtttggctatgtttttgcctctgatctagttgttaaattatctgcttagatgtaaaaatggtgaatcacattgattaattttaaaatattaaaccaaccttgcatttttgtgtataaaccttacttagtcatgatgcactatactttttatatattgttgtattttatttcctaaaatttattaagatttttgcatctgtggcaatgagggctatttatctgtaatttttggttaggtcttcgtctttttcggaatcatgataatactggcatcataaaatgaatttgaatcgattgtttttctttaattttcagtgatgagaagcccccgagatgataggaaacaatgaacaccaaaggaattattattttatttaaaaaatagtgcttgctataattgaataatgttctaattttagtatgcatgagaaatacctgaaaattttacttaaatagagatcctggctgggtgtggtggctcacacctgtaatcccagcactttgggaggccgaggcaggcagatcagctgaggtcaggagttcgagaccagtctggccaacacagtgaaacctcatctctactaaaagtacaaaaagtagctaagcatggtggcaggtgcctatagtcctagctacttgggaggctgaagcaggaggatcacgtgaacccaggaggaagaggttgcagtaagctgggatcacgccactgcactccagcctgggtgacagagcaagactctatatcaaaaacaaaaacaaaaccaaaaaaaaaaccaaaaagatcctgatttagaaagaaggaaaccataactagtattaacaaagaaaaacatatctcctcaggtgattttttatgtagatgattcatgttttgagaactcttagtctgctcaaaagttctcaaagtgtgtttctcagaccagtagcatcagaatcacctgggaactttttaaaaatgccgacattctgtactcactccagatctactaaatcagtaactctggggaaagaagtaggtgcagtctgttttttattaggctccaaggtgactccagtgcattacaatttgagaactattgttctatgttaatgacacagagagagaatgtatatagatgcaattaattttgtatatttttagaatatatatgtgttaaatagtgggaaatttcctctaaattggctgcttgtttcttatgacctgtatagaaggtctgagagtgagagagggaaagttgtgtcaggtgtgtgagtagtgtggagacgatatggctgatcattagggaaacaggaaggcaggctgatgacattgttagtgaccattagatgactacttaagctctgtgattgctgttctttattggtgtccatttgcccagtggtacagttttcttcccccattctgagctgcccacagtagaggtatggagaaggcagtttcttggatttgtgtccatttattttgccaaataggtagaagggaagacaaaagggataaagtaaatagagtatttgcaagagagtaaatgactgtagtcatggaccatggtcactgtcctatataaacagaaagatgaagacaagacgaggataattaacagagaaactgctgggttctacggatacaaagtcttgatgagatggaagaattgtttaggtagatacaggttaagaaaggacctaggagtataaatggtagtggctacagagtgaaatgtttgtttttgaattattgtcattttcgtgataagctacaaggtatgaccttggtaatagaggctgagttctactgtgccaaatcattggtattgagaaggacagagactgggtgaataaaatacttacgtgcctattgattttttcttcatgagtgatgtcaatcatagtgatagtaggaagaatgggaggctgacagccaaggactaaatcagaatcagaaaacacaggggcatcagcaccacagaaggtaaattagaaggcatcactgccacaggaaagctcagaagcacctgagtttgtttctctagctgattaatttgggccttaccacaatttcacaggcttatgtccccagtaaatcctaaagtcatagaatgtcttttgatgataaatctgtaatcgcaatatctgagtatgagttctgatgtagccatgcagatacaaataatagcaaccagttatcctgtagaactttgcaaagtaattgaatcataataagttccttgttttttccctatttatgacagaaaccaaaaagttggctttgaaagactcctaccagctcagaagtacatggatgaagatagttgctgatgcaccccgctagcatccattctaattttgtttttcaaattcacagagagtgaagaagtttatcaaaggcaggtgctgtcaatttcatgtatcatctttggaattgtcatcgtgggcatgttctgtgcagcattctacttcaaaagcaagtaagactatttctctcaagtgtttaaaggttacttttagagaaagcgctttgtgttactttaagttctcagtctgtgtgccacacagagggaacctgtggaaatgggtctagcaacaatctgcaagtgacttaggacatttttgtaaattgtggtgagtgtgtacaggcatgtacatgcatgtatgtgatgtgtatgtgcacacatgtgtgcgcggtttatctacgatgcacataatgatcattcctctcagtgaccacgaacattctatgttctttgcactgattcaccacttgctggtattaagggcttggtgtctgcctgtcactaaaggctaactcttctgaacaaaggggccactgctatgaacctgcacattatcaaccattatctatctatttctgaaaaaacaattcagtttttcataaagattttaggcaaatgtggaatatgaatactaaaaaatatacttcagtttaccagttggtatgcacatgttgaatatgccctaaagttaccttgctgagaaactagaccttcttcagataaaggtgtttatgtttgactagaaatagatgtaggccaggtgcagtggctcagcctgtaatcccagcacgttgaggggccgaggcaagtggatcacctgaggtcaggagttcaagaccagcctgaccaatatggtgaaaccccatctctaggaaaaatacaaaaattagttgggcatggtggcgtgccactgtagtcccacctacttgggaggctgagacaggagaattgcttgaacctgggaggtggaagttgcagtgagcccagatcacactgctacactgcagcctcggggacagagttgtctcaaaaaaaaaaaaaaagtagatataaacgtctctctctctctctctctgtgtgtgtgtgtgtgtgtgtgtgtgtgtgtgtgtgtgtgtgtgtgtgtatttttccaaatgaactctggtagacgtatttcatttattaaaatgatataatctgcacttaagaaatgcagataaaaatattagccccttggtttctcatgtcttaagaattttgcacagatttggttcctacagcttgtctgaaattcaagccaatgtgtaattgcttttcagtggacctataattttttaccaatttgctcttctaacatgggattaatttccaggtatagtttgtgatacctgtctgcatgttatctgtgttgattctcaaagaaaactgtgattatgattttttaaaataacagaaacttgagcatcaattcagaattagtaactattatcttcctaataaactatttcagaatgttttttagatatttagaactgttgcaaaaatagaacagacagtttctatataccttagaccaaagttcctccattattaatgccttacattagcatggtacatttgtcacaattaatggaacaatattgatatagtattactaactaaagtctgtattttcagatttccttagtattttacctaaggcccttttgttaatgccagggccccatccttaccatatgatattagctgttacatctcctaggcaactcttggctgtggcagttgtaactatcaatttctgaacacttactctttgccaggcacactgggcttcttatgtgttagcttccaatcaccacagaaatcagagttgtgcattattactgcatttttcaaataataccagaatttattttaaaatgtttatttttcaaagtcataaagaagaaaatgacagataggttctttaattttaggagttctagtttaaatcacatgctctaaacctctataccatactggttcacatagtccttctgctagatggtggagctgcgcagagcgagttaggagttactctcttttgtgcagcccatagcactttatgttctccaagaatgccatctggcataatggtcagggttgtacactagtgagtcatacttggattcaaatcttcaggctgtcatttacttgttatatttgattaggcaaattatatcgtgtctcttagccttggttccctttgtggtaaaatatgaacaagtataatatctaccttatagaattttgttaaggattaaatgcaatcatggccagacgcggtgactcatgcctgtaatcccagcactttgggaggctgaggcaggaagatcacttgagaccagcctggccaacatggtgaaattccatctctactaaaaatacaaaaatgagccaggcatggtggtgagcacctgtaatctcagctactcgggaggctgaggcacaagaatggcttgagcctgggaggtggaggttgcagtgagccaagatcgcacgactgcactccaacctaggcaacagagtgagattcagtctcaaaaaaaaaaaaacaatgcaatcacagtgtaaagggcatagcaaagtgtttaaaagagtaaatacccaatggaggcttgctgtcgttaacacccatggttttccacactagaacttggaggctgggtagctataaagttaagagcctcccctggagcacgagagtggtaatcacacccagcagggtggtagttagaagtgtctccctgctagagctttgtacaagaaagaaattccttacttaacaataaccaaattacaataaagaagcagttaatcacttatttttacagtataatgtgtagttgtaccacatttaaatgaaagacagatcatggtaattatgaaagcaaacagctggattaccaggggacttccatctttggggctgtcaatgtctcactctggacagcaagagggctctgagatcaacatctcctcctgggactcagtgaggagtcaaagtgtttaatgaaaacaatcttcaacatcagattcattagggtaggctcagaggactgcacagaagctagagcaccaagcgggacattgttatctttctgtctaccagcctgggacacagttttatttaaaaaatgaatcaattaataactaaaggcaaaaatgataaaatgatgatacaaatggaagtattttccacctgaaattggattagctatatgttcctcattagaggcctagggtgcatttccttcttctagtaccattttcaggcttggtctcccttttttttctttgcttgagagaaatgccaccaccttaccaagcacctaatttatattgctaaaagcaatatagattgtcataaaaccctggcacaagttgtgtgtgtgtgtgtgtgtgtgtgtgtgtgaattcgtggatttccttttccaaaaccttggggagaacagaatatccaaactctaccttgaccttcccttactttcactcataaaggaaagtagtttatatgcatatacattttttactttagcttagaagccccaagtcttccaggattctaaggcctctctatcactggtattcaaataagttcacttgaacctccattcgatacactgggatgtatagtttctgcccagagggagctgagacttagctcaaagctctcttgatcatttatgttctacttcccataatcacttagaccttgcctttatgattctttttccattccctcgtcacctttggcatggcatgacttcatcagaaggaatattacagcaaattctgtgtctgaggaaagatggaaggtaggtaacatgataaggaataagtaagaaacaccttgaatttagaggattttttgatggagttaactgaacccatagcaactctaaaaaacagtgaaagaaattctcttcactcccaataagctcatatattcctatacatagttaatagaactattaattgagcctgtcaagtctggccagtgtggctcacgcaatgactgtaaattattcaagtttttctctttatttttaacttatgtagttaagaatgatggggatgagtgttagagttcttagcagagcttggaaatacaaaatatgattcaactctaaaactagaattgaagtaggagaggatatgtttcaggaggcagaatctgaaacaggtaattatcacaaatgggaaaaaagaggaggataaaaactggtattatcagtaaaatgtagacacggtaacaacctgcccctaactataggtcatcaaccccttgaagtaagagattttagatcccaaaaaaagcctcttaatggcagacactctgatgcactgctgcgtcttcttcagatatggaggatttagtcgccaagtttgccagcaaacaccggtgaagagtcacctttctcaatctcatgttccattctggtattgtttacctccaatgatgcatcgatatgaggctctgaagacctagaccttttccccaacttcaggtgcaagaccatgccagcttcagagctccctctgaggtttgctgaggttttcactgagactgtatcacattccaacttctccccagcccaattctgcttccatttcttccctttgcttccacaggtgttgataccaagagctctccttaacaaaagtcctctatgctgtctttatcccagggtctgccttcccaggagcccaatctgcaacaagacaaataatgcctaacaatggattaatgatgtctactattctgcaacttacatctcatttctttctaatgcattggaccagagaaatttaaaactcaaatgaactgtaaagtttccacactgacactgttgggctaatagtattcccatgtgcaaggcatgcatcttttcttccccagagcaatgcctctcatgagagagctaatggtattgcaatcagctgctgattgttttctctgttcccattttctgggtgaaggaagaaagagcaaaaaagtgtgtgcttgtgagagaggagggatggtagataggcagaggcaggctcagaatggaaggaccacgtatcttggaatattactaagtcaggacttgagtgaaaaaagactaaaggtaagcaaattataaaaggatttaggaaacgcagtccggtattggatattgcttaaagaaaattcccttataagtttatacttccaagactctgaattggattactgcaaacatcattaagtgtttctaatttaatcccatgagagtaatggaatccttgctctgagacatgcactcttactttttcaggatgatttaccagactagaacctcctgatttccccttttttgtgtgtgcgaatgaacccctgataaaatcttgtggctgtaacatgctccttaaaatgctgatatgatagatttatttttaacaataggctatagattagctgttaggaagcaaatagattattacaacaggattaaagcaactaagagtgctagagataaaagtctcccaaataattggaaagataaaagaaatatcttaaaaaacagagctacatcacactgatattgtaaattcaaaatgggtaatgaagctcaaagcctccaaagcttgcagcaagtgctggtgaattgcttgggaagatgcaactagtgtaatcttttacctttgggtcaatgttctgattcttttgcagcttctgctcacaagactgagcttgcttgatggtatcgggaaagatatgaacattttgcgtgtgcctccacatgcagccaccacagtgtccgtggaagatagcttttatgaacttcatttacagaggaggaaatggaggctcaacaagtttaggaaattattagggtagcaaaactagtgggtagcagagtgggattcaaatcccagtccctgtgatacaataagccacgctctgtagggtgctactgactggagaagctcattgctaagaccggccatgtgctccactgacggcactatctttgtcagagacgttggaagacaggcaaaattcaagggcatgattctactgggaaagttgtcagaatcaaaatggagtcatttgtgttaaaaaccctgacaaatagagccggagaaggacatgaagggagcagtcacgtaggcaaatgcctgattacaagaactatcacaaaagtctgtgaaaaccgcagctttgcatgaagactattgcagccttacatgcacgaaaatagttctgcaaggacatatgcccagcaacttcctgtccacccttggactggcaccatcctttctattgatccttgtagccaaggatagtgatctcaaatcagttgtgtacctaacgtttcctgtcttcctagtgataaaacatagtttcctatatcgtgtgtattcccattgcaacacttatttccaaataaatattttcttttagagtctccatgtttgttatttaggtcaacactgcaaagaggtgtgcgtgtgtgtgtgtgtgtgtgtgtgtgtgtgagtgttgtgtttaatgggtaccaagtctatgctaatagatgatttctgtgaagcttctgggacagagctgctgctaaggcagtggtttgtcccatccttctggtgtaggcactgagtgacccagacaacagtcattccgcatgtgcacacaggagcactttacttgaagtccagaaccctacagcagtttcagccttttcactcagaagcggtgggaccatgagcacatggcttggcaattctgagtggtggttgaagagtgtaaactatggaggcaggttggctgggctgagatccaatcgctgccactcactgactatgtgacgtcaaacaaatggcttagcttctctgtgctttagttctcatctacttaatgggtatagcattatggcctcatcacaaagaattatcatgaaaaatctgtgaaatgatacatataaagcacttaaaaccatgtgtggcacattactgtataactagctctttaagagttaactatttttaatatctgggctcttggtaacaataaatgagctatttctaaattgtaaaagacagagaatatacacattatggtatatagtcaagttgtgcaattaagctaaacatatttgaattgtacaaatataaatgtaactctacaaatatgtcatatgtacctgctaagcccaagtcttaattgttttcctctagtcactttcccatagtatttccagttctttgcagctaaaactcagggttagagacttcttgcatctatgggggccagggcaatgcactaaatgtttgtctgcttttggggtgccactgaatgtgaattcctagagaatatggatgatatcaggttatcactaaactggaagtatttctggtggggttggaaatgagagaagggttctcttcgttagctgagtttatttaactttagcaaataacaaatatagacactgggaatgaatgagaccctgaaagtaggagttgaataaagtcatgcaaatatttgtacacgtttatttatgcctgcaggaaacaagctaaacaaatccaagagcagctgaaagtgccacaaaatggtaaaagctacagtctcaaagcatccagcacaatggcaaagtcagagaacttggtgaagagccatgtccagctgcaaaatgtaagtgacatgtctacacacctcctcctatagcctacctcagtgcttccagctcagaggtgttgggagcctgggatcagacttgtaaatatttttcagagctttatagggttttgcttaaatcgttttaacagttctgggctgggacgtatgcacacatgcatgtatgtatgcatcagataaaaggcaagttaaatttcagctcttgattacaatctgtaatataaactaatctctagtaaaaataagagcttcagttttttgtcccatgaacacttgttgaatccttagtttgtgccagaagttgtatgtgacaccaaggatacaatgtcccttgccataagggaagttctatgtaggaagaaacacaaaaacccccagaatcagaagaagtgagttccgagatagttgttgttgcagcagaggttggacaagaggaagccagtgggaggtggatgggggtagacttgggggctgcctcacaacagagtcggactcggactgggtttggaaggatatgaaaagttctatagagagtcaaagggctaagagctagaagccagaacatgcaggaagaataaagccatggaatcctaaaaatgcatgttatgttcagagaactccaagttaaggggtgtgagaagaatcaaaggtgaaaggtggagtttcataatcaatccttctaattccaagccttacagagatatcagaacttgaagttaaatgcaaactctttgcctcttacactttttgtaaggcagttttaaccattactgaggtatattgcaaaacactaaattaaagcaagagaattctgtgtaatacatgcagatatattcctcttaggttagcaattctttgaccccacacagcatccgcactttcagaatctgaggcataaaacaaaagaacaaaggccattgcataaacctagcatttgagtataataggcaatcatccaggacacattcacacccctccaaatgcttcaatcactggaaatttatacatcactggtgattctaagaaatcattacccaaaaagtcgctattatgatgtccataacagatgtactcagatgatttaatgcagaattcataaatcagagtctcttcccaggcaagttttgttaaacttctattcatggcaatgtgcaggaattgttcatttcagaaacagagtgaatggttttgctattgatttctaatgggtataatcccaccactctaaaacaaccacagtgatggagggcttcattccttagcaactggttatgtcaaagataaacaaagccagacactagttaaagtgatgaggatagattctaatcagtaacatgttagtggaatagttgaactgaacttctatttgtacggaaatggctggatttttttttttttttttttgagaaagaaagaagtaaaattatatttgtttgtaaatgacatgatcttctgtgtagaaaatgtcaggcttctgagcccaagctaagccatcatatcccctgtgacctgcacgtgcacatccagatggccggttcctgccttttctgatgacattccaccacaaatgaagtgaaaatggcctgttcctgccttaactgatgacattctaccacaaaagaagtgaaaatggccggtccttgccttaactggtgacattaccttgtgaaattccttctcctggctcatcctggctcaaaaagctcccccactgagcaccttgtgacccccacccctgcccaccagagaacaacctgctttgactgtaattttcctttacctacccaaactttataaaacggccccacccctatctcccttcactaactctctttttggactcagaccgcctgcacccaggtgaaataaacagccttgttgctcacacaaagcctgtttggtggtctcttcacacagacgcaagtgaaagaaaatcccaagagtcaaccaaaatactgctggaattaataaacacattcagtggatttgcagaatacaatatcagcaccaaaagttagttgaatttccatacattaacaataaacaattttaaaagaaaattaagaaaacacttccatttgctagagaacttaatgtaagaaacgcttaggtataaacgtaataaggtgaaaagtttgtaccttgaaatctacaaacattgatcaaaatgattaaaatcaatagacatacaacccatattgatggattggaaaaattaatattgttaaatgatgatataacccaaaatgtggtttaaattcaacacaatacccataaaaatctctatcagtttttgttaaagaaacaaattaatataaatgcattgtctcatttagttctaacaattaatttatacccacaatgtgcagaaaatagaaatgggatttggagcttgagaaaggtatgtctgtcagacagctagtaagtagctgaaagacaaaccaacatccttataactcagtggttctcaacagaaggcaatttgcccaccatcccttgacatttggcaaagtctgaagacactttggctattgcatgctgggagaagaatgctacaggcatctagtgggtagcggtcattggcgctgatgaacatccttcaatgcacaataacctccctcaacagaagattatccttcccaaaatgtcaaaagtggtaaagaagttcacagtccatgctcaagtttcaaatgggaccatggggaagttctgaacaccaagttccatcaccaagcttcccaccgcaggcatttatttccactttacagagggtgacgggttattcaggcatatttcatccttggaaaggaaaatttcctacttgcttaccatatcaggcaaatctgtctttgttttatcttgaagctcatgttaactacttgaaattctttgcaaattgcagtgtttaacaaatgaattgtctggctctggcattcctttattaagttcattaaacattcatggaaatgggtttcactttatagtcatctaacaagatgcaaaacacctcgtcaagtgaagcaacatgatactctggaaacacttgactccaaggctgcagaactggagtagattaccctccctgagaagcatctagtccctaccattgttttaaaaacaaataaagcatctgtgagtaaagatgaactcacctcctttgctgtgtctcaagtaagaaagagctaaggatagaattataacctctagaaccttcaaggcaaaggagtgaaacttctcagcctggtttagggatcagaaaagaaagtcatcaaaagagatcatccgttcttctctcttaaaatcaagagaaaatattcacaattgaaaaatgaaagaagaaaattgtatacccttcataccttttttttcagtaatcattttaagaaaggtaagtttatgggggaggtaacattaaatgagaaagaactggaagataatacttgcatgctaaagaggaataataagaatttaatgcctaggccaggcgcagtggctcacgcctgtaatcccagcactttgggaggccaaagcaggtggatcacctgaggtcgggagttcaagaccaccctggccaacatggtgaaaccccatctctactgaaaatacagaaattagccaggcgtggtggtgggtgcctgtaattccagctactcgggaggttgaggtgggagaattgcttgaacccgggaggcagaggttgcagtgacccgataccatgccactgcactccagcctgggcgacagagtgagactcagcctcaaaacaaacaaacaaaaaaaacaaaaccaaaaaagaatttagtgcctaacagagccttaaaaattggtgaaaaggcacatatttatccagtaatgtttattgaactctggtaaagcccacacttctctgtgttgggtactgcagggatagcttagaatacaaacagaagaagtggttcctgatctcaggatgttcaaaggttagtggagagaaaaatgtacaagcatataatatctttattatatagatacattaaatcaaagtactatcagagaatggaaaacgacttctgaatttgactaggggaatctcaagcctacctaaaggaggtcacatgtgaattgagttgttggcctaaaggaaaacaaacaaaggaaacaaaaaacctaggcaaacttaatataaatagagcaattattttggccagttttgaggactgcaacctgagagcatagacttaatgtaccctaaatacatgctcccatcagcagcagttacaagtgggtttttataggaaatgaagaggcagttcccaaattgtttatcaagaatttgcattaggccgggcgcggtggctcacgcctgtaatcccagcactttgggaggccgaggcgggtggatcacgaggtcaggagatcgagacaatcctggctaacacggtgaaaccccgtctctactaaaagttcaaaatattagcctggcgcggtggctgacgcctgtagtcccagctacttgggaggctgaggcgggagaattacgtgaacccaggaggcagagcttgcagtgagccgagatggctccactgcactccagcctgggtgacagagcgagacaacgtctcaaaaaaaaataaaaaagaatttgcgttaaaatagtataagctattgcttggcttatccatggttctttttattacaaattccaaaaacttgaaaataagtgatgaggcagttaggaacaaaatgtctttaaacaatcacccctgggtttggtgggggtgagtgactacaatcccacactctgtctctctgggcctgataaattttgcatacctcatatagctcacactgctctgagctatttttggtagagttttgagagtgaattgaaaatcatggaattgtttgcagggagtaggtcagaagaggtaattttgttgtagcattaattaaagttaatttttaatagttctagcctaaacgctgatttattgctttaaatatcaaattataacttattgattgaatatagattcatacattcatttatttacttaaatatagactaaagagcctactaagtaccagacaatacctattaaggaacaggcatgtgatgatgacaaaaaatgagaaagctgcttctttcaagaagtttgctgattactgcgagtgatcaatataaatcaaataatctcacaaatgtgggctctcatctgtgccaaggcctacaggaaatagtgaacggtgctatcagagcttatagtaggcaggctggggagttcatatcagaccaagaatagctcagctctctaaaaaggtgcagttaacacatgaagaatccccctggtgaagtggtaatttgctggggaggaggtggcgttttgtgctgtgcctagtgtctgaagagggtctcttttcatattattttgctttaaaggaaatgtgtgaaaattgcaattcttaaagttcttgctgctttggtgtccatgcaaaaattctcaacagcggtcgagttgtttttaattacctacattagaaatcccagtgaaatcactcttgaaaacatattgtaactatcaatttccccatactcgggctcataagtcagagtggcaataaagaaaattttgtcacagacatatttgaaccaagcaatgcagagagaaagacatttaaaactgcctaaaaatatcctcctcctgcttttattgcctagggttccagaccaggcgattatcagcactgtcaacattgctgtccaaaactgaccctactttcatttaaccttctgactcctgctgtgtgcatgtggcagacctggaaacaatgctgttattctactgccaacatgcgcctgcttcatttgactggcctattgatttcggtgcaccacctacaatgtgctaggagcaaagcaggtgggcgggcaagaggagataccttcattacctgggagcatttgcattagccggcactttcaggggggccagttggatgaatgcttctcctaggaaataacaatattaaccagggcctatgaaggagttaacaacaacaacaaaaaacacttgagctaatgctgagagcaccattgaatgaactggggcatctccttattcactgctaacaggatcttttgtatattataccaaatgagctcttaaccatgtgcacacaataaagtcaggatctgtgtcaaggaaataacatagaatcaactgccaggctttgtaacattgtagaggatgctaatagggagatccagacaggcagctaatctgagcacttaaatttcactgaagatacaatcttaagaataagtttgtccagaccttagcttgtctcggagatagaactgcatgcatttggatggaaacaaaataaatatttttgggctgggcactgtggttcacacgtatgatcccagcactttggaaggcaaaggcagatggaccacttgaagtcaagagtttgagaccagcctgcccaacatggtgaaaccttgaccctactaaaaatccaaaaattagccgggcgtggtggtgggcgcctgtaatcccacctactcaggaggctgacacatgagaattgcttgaacctaggaggccgaggttgcagtgagccgagatcaagacactgcactccagcctgggcaacagagtaagactctgtctctctctctttatatatatatatattagcacagagcataaaatgtccaaaagctatgatcatggtcagtcaggctaactttccaggagggttggtataggtgaactgttttgctgagtggagtatgcatcttgagggcctacacctgagctactcaagcaattaagggaagactgaattctgcctttagtctctcaattctttttgtttatttcgatgtgtacttttttaatcatttatgttattttctattttcttaagcagatctgatattttaggatagctttcaatttacagaaaagttgagaggataccacagcaagtttctatactctgtattcagtttcccctattattaaccttgtatattagtagggcacaattctgaaactaacaaactaataagaatgcattattatccataaaatcccacatgttggcattctcacaattgctattgtttattctgattttttgagtgttcacctgattgctgcctgtgttctaatcccaggtaccgcattacatctaatattcatgtctccttaggttccccttacctgtgacagtttgttgattttttctttttatgatgaccatgacagttttgatcagtactggtaaagaattttggaggatgcccctttattggaatttgattcttttcttatgattacatggggtttactggttttctgtagaaatttttaaagtgccatttttattatgtcatatcaagatacacgctacaatatgatttattattattgaagtttaccttatcatctgtctgaggtaatatttgccaagcttctccactgtaaagttacccttttcttctctctccttttgcatagaatactctttggaaggaagtgattatgcatagcccactcttaaggagtggggagttacggtcttctttccttatggttaagtatctacataagttatttgggattctatcacaaaggggttgtctcttctctcccatttacttatttattccatcatatatttttatcagtataaataaactcatggatactattttatactttgatttgtaatctaagtagtaaatactatgttacgttctcatcagttttttctggctttggccattgataggtctttcagctggcttatgtcattttaacattatgtatcaattcactgtaagttttcagggtttttttttgttgttgagcactacaagacactccttgcttatgttgtacattttctgccttggttctagaatcagccatttctccatggaaatagctagtttctttctttgcagaatttcattggagactgagatttggaagctaggtgtgtatgttattgttgctacagggatgtcttttcttggccttctcaacagacagatcaaagattttatatatatatatatgtatatttttaaataatagatatattaaatatgtctacttaagacatatttaaataatacatatattaaaagatatatttatatattgaaggttgcatatagactaacacatatctaaatttttctatgtaagcatctgtatctgtattctgctaaacatgtgtctacattgatgtctacccccaaatctaatccataactacatcaataattctaccctcctcccgttgcttatttataaatttccactccaacagtgaaaaacctccttcccactgtctattattcatttacttattttttcagtgacagaatacacataaagcattctcacaatggttataccatacctttgcactgttcaactttaatggctaggcggtgcatttgggcggtagttttgcctttagtctgctgaacacttgtgaccttcagaagtgtttcttcactttttttcctctcttacgtgagacggaaaggctacagggagcaggaattggggaagtgccttctttctggtgagataaggctctggtaaaatatttttactacaggagtaggcaattgttattgagaatgctctgtgtgcatttcaaaatagttacttttccccttccactggcagagacattagatgattttttttgttgctgttggggttctttgctgtgagaacctggtgtggttcctggaggtcaaacccatggaagtatcggcattctgcctaagactacagaccccaactctcgttctagtgcccatacagattccagcaacttgtccaaattacttcttaaacattcctaccaatttatggttccagcagattcagttgcagaaaagctgatcttagccattattctctgtattcacctgtttctccagatttaaggtggcagtgtgcccttcaacctcaattatccaatgaatacaagaagacattttcagtttgttcatttatttttcttattgctaggacaggaatagcgacttccaaactcttagcttgtcaaaactgaaaccacagaagctatctgaattcatgttcaacaaaaatgtatggaatataatttggaagttggtcaaattattagactcttatcatgcttccacaagtttcaagcaacctccggataggaataccagcaatttaaacttgaatttcaggtacaagtagtcactgaaacaaaatgctgtgagagaaagaaaaaaagttctaaaataataaattctggaaacacatttatattaatggaccaaaataatacaaataaaaacaactgtttaatatcgcaataattcaaacatatgaaataacagatttaggaaatatctatcatgaacactatgaataaacagaacaggttaagaggttaattctgtttatgagtgttatccggaattttggacaaggccctctatctctcagattctaagcagagactatgaactaatggtacaaaagatgaattaggctttttgacaaggaaggaagggaggaagggaggcagggagggagggaggcagggagggaggaagggaattactgacttttagtgatttggcagtttctctaaaagatctgcatgctccagaaatagttggctgatattgtcccctggcagcccgtattagtccattttcacacgctgataaagacctacccaagactggatgatttatgaagaaaaagaggtttaatggactcacagtttcatatggctggtgaggcctcataatcatggtggaaggtggaaagcacgtcttacgtggcagcagacacaagagaagagagagccaagtgaaaggttttcccttataaaactatcagatctcatgagacttattcactaccatgagaacagtatggaggaaactgccgccatgattcaattatctcccaccaggtccctcccacaacacgtgggagttatgggagctacaattcaagatgcaatttgggtggggacacagccaaaccatatcacagctctctgcagttgctgaacatacttgctttcttcagtttgtcatggatttgcccagagcatctcacttgtttttgtagctgggccttctaggcacctaggtttttcttgtaaaccagtttattagataaaaaaagatatgtcttttatatccctcatatgtcttttatagacctgaaagtcagacagatattcaggatatcatcgcactttaataaacatgtccattcatctgactttttccatgggtactttgcaatacacaatcaataatgaagcacacatagaggtatttccattatgtattggatctttgttatttgaggttgttgaaaacaatcaccttttccaaattatctctgtaccttctctttgttctctgtcattttcctccattttgcaaaaagactgaccagcctttataggtccactgtgaaaaattcggattctggttcaagacatggtcattactgccactatgtggcttgttttggaagttattgaaaataaaacatttaattggagcttttgaacttaaagctgcaaaaccttgatatgttccctagtctccatagcttatactcatggatatactttttcccaagcataacacctaattagatagttaataatttcttttaacttaaaaatctgcctcctaagtaattgcgtgagaaacacacacatgcaaatgcacacagaaaaatatatgtacatacaaaatctgtatatatataaacaccaggctaattatgtgtatataaacataaatatatacacaatctatttatatctattaattgcaccttccttatttacacaaatggatttatatgcatacgcttttgcgccttttattcttttcaatggctgtgtagtattcatttatggacatttctattgttttgagtttttttcacttttgtgtttatttccgtttcgttatggacaattgtgctgctgatgtaccctggaaattattattttgaacttttgcaattatggaaatttgcatgatagaaattctaaaagtaatattttggatcaaagagtatgtatatctaaaattttgaaacatattgtcaatttgctcttcaagttagcaccacggctacttttccagggccttttcctttatcagatattcttgaaatttaaatttctctatttattttaaaggcagagtcttgttatgttgcccagcctggagtgcaatagctaatcacatagcacactacagtctctaactcctgggctcaaatgaccctcccacctccacttcccaagtagctgggactacagctgtgcaccactgcacttagcttaatttcctctattctgattaccacctctttataatgagtgcagttgcactctttgccatatgtatgttgcctgtctttatttttctgtgaaattcttgttcacctgttgcctttcatttttttccagttgatttctgcctttatatcttaagaatagtctttaacataagaatagcctatgtttccccaggcttttacttatattttgatttactaataatcatttttgttacttaagacatttaaattagtagtaaatcaaattttacatatttttttctttatggtctctaggtgttttgtcctggtaacaaatgtctttctcccataaggttaggaatacatctcccatatagttttataaaggtttttgaatgtatttccattatccaaagagttcattcatatcttcttgtgttagtctgtttgccttgttataaagcaatgctgaggctggttaatttataaagaggtttatttggctcacagttctgtaggctgtacaagaagcatggtgccaacatctgcttctggtgagcatttcaggaggcttctgctcatggcggaagggaaaggggagcaggtgtcacatggtgagagagaaaaaagagaaaggcgaagggtgccatgctcttttaaataactagttcttccatgaattaatagaatgagaactcactcattactgcagggaggatacaaaccattcatgaagaatcaacccccatgacccagacacctcccaccaggcctcatctccaaaattggggatgaaatttcaacacgagattcaaaggggacaaatatccaaactatatcacttctctttatcaaaatctaaaaatataaattgaactaaaattatactttactgttatccatagttatgttccttgccacaattcataggtaattaagttatgacaatgttaatggtttataattttcgtgactagttgagaaagccgttcttttttttttttttttttgatacagagttttactctcttacccaggctggagtacagtggcaccatctcggctcactgcaacctcaatctcccgggttcaagctattctcctgcctcagcctcctgagtagctgggattacaggcgcatgccaccatgcccagctaatttttgtacttttagtagagacagggtttcaccatgtttgccaggctggtctcaaacttctgacctcaggtgatctgcctgcctcagcttcccaaaattctgggattacagtcgtgagccaccgtgcctagcctgagaaagcctttcatagtgaagctttgttgttaggtagataaaaatttatgaatatttatcacttggtagattgctcattctatgaatatgaaatatccatctttcttccttttaaaatgcattttatacataattatattttatttgaaattattactgttaaaagctttttcacctgtacattgcagggtatatctttaccaattctgtcgacttttttctctgttgtttttaaattagctctttcagaacatagaagaccagatattcagtgtatgaatctgtcttttaatagttaaatctaaccatccacagtttttatcatcactgatagtttcacacttattcctgtcacatttatttccaatttaccatgctctcttgttacaaacccccttattaatttttgttgaattaatattagtttagttttttcatgtattgtatattacacaattcttatattctagtgctgtctaatttctaatacttaaatatatatattttgttcatcagtgtctaaaattaatcagcatgcatatattacattgtctttattctcaacaatcccagctaggattttttgtttttaaatgttcattcttctctctttttatgttctttttcttatcaatatcttccagccatgttgaaattctttggactttactttcaagcattaattttaaagccgacattttaagaaagagcttacaataaaatatcttccactccttcctcctggattcatttttcttcggttagaactatttctttctccatttcttacttcataagtcatctttagaatctatgtaaatataagactacaagcagccactaccaattgattagaaatggtacttagggtggaatttatctttagttttttatagttcagagataacatttctaaaaggctaggaaacatcttagagtatcatcttaattattgtatctaccttctttttacctggatcaagtgcattaagtattgtctgtgaattttttcaacaaccctataagagagattttattatctcaccatatagatgtgagattcaaaaaggttgattaacttgattttttttatcagtgcttctaatactggcttctttgcttttgaaatgagaaaaaaaaaggtatactgagttttagagttttacagttactcaggttaacacttaaaatctgtagcttgacacattgggtactgaatatccagattcaaaactctcttttattttgattagcatccttaaacttctatttctaaagaaagtcttcacctggagtttctagaagagaactcttctaccttttgccacctgttccagcgcccagtgtgcagggagtgttaaagttgacaacttattggctcttgagatgccatgtgatatttcttttggggtaaaatttttctgaagttgtcatctacataagccttctttaggcttctatatcttataagctattatagtcaaaggagaaaccaagagttctgaactataaggagtgaaatgctcacaaattctcttgttaaacatggtaactacctggtaacaagctgaaagagaaaaacagtggaatgtggtggccagatattctgaaccaatgtctttcatcattctcagaatgttatgaaatttaataagtgttgattcaatccttattattagtaacccagctagtaattcaatttttttggtaagatgtacatcaactaaaacatacttgtaagtgccttttggctgtcagtcatagtgtgccatgggtgtgcattaattaaaatgagatagcaggcttgggatgctgacatgaagaaccctcttcaatggatcctgactaggcacagagatggttggggcaggggaggtgaatactcaatgtattggaaacaggacacaaattatgtcttatctcctgctcctctagtcaggtgaccaggaggaactggcattccagtaacttctcaatgcttagctctggtgttataggccctccataatgtatccttcgtctcaactctgtacgtgtgatttcccacagtattcaaaggtggaaaggcatcctgtgactgcattggagaaaatgatggagtcaagttttgtcggcccccagtcattccctgaggtcccttctcctgacagaggaagccagtctgtcaaacaccacaggtacaagtagctcatcatggtgggtgtgggcaccttcacactgtgtgtatgctgggtggcacatgccaaggactggcagcatgacttaggagagacaactgttcttgcttctcctgtagttctctgtggagtaaatgctcaaacacctcacatcaggtaaagcaaagataccagtttccacagcagacagcattgcctctgtaagaaacctgatagaactatagataacacccatcaaagttacagaccagtaaaaaaaaaaaatgcattctgaaaaactattttaaaaaatatgttatctagcctgccttttctagattacacagttaatgagtaattcttccctatgcagcctaatgtgacagacttcaggttttccaatatggttcttacaaaataaaattttccacggggaagaagcctggtgaatcttcttcttgggtctataaaatcttctgttataaatgaggtggcagtttcttgcaagcttcccagaaattggctgctttggagaaaaagccaaaaacatagttatttgacacatttcatagcattctaaagcttaacttgtccttcagcatcttctagtccacacttttctgttatcaggattctgaaactccaaatattaaaggtatttgttctaaaccaaatgatgaagtttatgactaatgctagattgtgttcagatatacatcctcaatctttatggaagttgtccgaagacttaagcttccttttcttagtgaaatgtacaatattttacaatttgaaaaaattatgaaaaattaaacattttaacaatgaaaaagtaaataacagttgttcccagcaatgaaagttgaatgttgttgcccctttgttttcacatgctgggcaatagtttgcacaacaccaagccagaaacatacatgatagaagaaaactactttctccttcaccttttaatgagttacatgaagaggattttattgtttctggccacacttactttgagatttttagtcactcttgacactaatcctcagcacttcatggtaatttttattctcattctacatgagtagagactagaacactgagagtttgccatttaaaagaatatggtatgagtctatgttcaattcaggattgaaatatgtttggctcttggataattgctttagctattcttactgcaagttttgatttatatcaatgttgcatttacagaatattttcctgtgaaaagagcatttcatttcactggacctaatggaagttttcttaattagggaaataagtccaatattaccagtcttttcgaagacagatattttctcccaaatggtattttctcctcctgattatgacacgttaaagtagtattccacctagtcaagtaattcagtataatatcattctagtattatatgaactgtattctgtcataaatgttttaaaattgatatatatgttttaaaacatcagctcttaatatgtttgagctgcaatattcctatccccagttctcgtgtgcttttatgctccctcctaaacttggcttctcctatggtgtctaggagtcactcacagattaaataaggacatctttaagagaccttcctttttgtttggatcaatgacattgcagtatctgttggcatacactgtgtcctgatagatgggcaagcgttgacttacaaaatgcttttagaactttgtaaattatagtttaatatatcatagcttttgttttgtaaaacatgcaatagacttgaacgttttcatgatcgataacccaggcactgatttatatatcctgcaaactgcaccataacttcctgaatgccactgagttagaaggcctgaatagctgattgatcaataggcataaaactctttttaagacaggtcactagttcatactgatatactttgttgttatgacagtttagcgaactatgaataattaatttcttttgtgcactgcaaatatgactcatttggataactcatatatgaaacagagctattaattcaaagccattatttctaatgtttagttcgaaaaaatcccatctgtttagaaaataaatctattacggcatgtcatatttattgcattatattttggcaatataagtcacttatctttttttattattttatttttttggagatagagtctcgctctgtcacccaggctggagtgcagtggtgtgatcttggctcactgcaacctccagctcctgagttcaagggattctcttgcctcagccgtctgagtagctgggactacaggcacatgctaccatgccgggctaatttttatatttttagtagagacggggtttcaccatgttggccaggctggtcttgaagtcctgacctcaggtgatccgcccgcctcagcctccgaaagtgctgggattacaggtgtgagccactgtgccccaccatgccacttataaaaagcatgtatgtaggttttttgcattgaaataattccagggttttcagtgacagagaggaccctttgaattgccagctgtggcaggggagatagaggaactcatcgtgctgagcacctattgtgtgccaggctccatgccccatgctttgcatacttcctctctttaaacctccacatcccatagtgaacctaggaaaattcttaagtagaatgctgatatcttccttttgtcactcccttctcactctagcagctagtttctaccttttttgttttctgccttgccctgtacaccaagagggctgcaggctcttatgtcctctggtttctgtgggttcagtgtaaggcacaggcatgagatagacggcagggaggacagtgaggtcatggcacttgtgtccccttcctccctgcttggttgccttccttatatcccttttctggggccatggagcctgcagtgcggccccctccttacaactcactttctctctgcattctgggaactgctccctctccttgtcccttaagtcagagggataataacagcttcccatagtagtcctggggcacagcagtctcatttattgctttttttgccctcgaacacttatcacacttttgtatatagcaaaatctctaacaatgaaccaggttaaagtgccatctatgtctctccaggactctgactggtacaagtacctccatcagcatcatgcttccagtaactagttacctgcagacctgagacttatactcagttgcagccaactctagcatccaaggcttcaggccccgcagaccccatcattgccattggatggtagataaaagtaggaaggcaaggaagcaaattagctgttagagagcttctccaacttgtgggcttagtgagctatctagacatcccttgttaggcatttggggacacaccatataatgaatgaaggtataggggctaggcacagtggctcaaacctgtaatcccagcactttgggaggcctaggtgggtggatcacctgaggtcaggagtttgagaccagcctggccaacatggtgaaacctcatctctactaaaaatacaaaaattagcctgccattgtggggggcacctgtagtcccagctacttgggaggctggggcaggcgaatcacttgaacctgggaggtagaggttgcagtgagccaagatcgtgccactgcacttcagcctgggtgactctgtctcaaaaaaaaaaaaaaaaaaaggaatgaaaggaatgaaggtataacaatgaatgttgccagatatgatctcctgcttgcacacatttaggaagttaatgttggcttgaggaatataaagtttgatcagtcaccgtgccacaaccaagaaagtggttactaacactcaaataccagattttcaaactctaaccttaaataatatttgtaaagtcctgttttgtattgactaagtagaattaacagtaatatttatggaagaaaagtgacataaccccaaataatatagtaatatgggtaaaatgtctttgagagactggtttctttagaaccttgataaatttattgaaattttgagaatgttttcatctttctttctatggttgtattgatatttacagagttaaatgagaatggagcacagaattctcagttcctttattatttgagcactgcagaaccagtgtgaccacataaactagcatctcgtggaatgtctacacatgagcaaagttctcctcaccagtctacagtagggtcaattcagtggggtggagatgggaatggatatggaacaggtaatgagtctcatcagcaatggatttttatagagtctagttcttttctgtgcataatctatgtaggaattctcagtttgttaaggcctgtggtataacccacttacatgttttgctcattgatggcatctataaacatatagttatttaggcatttggatgtatgagtcaaataaaatatataatcagatgtttattaaaagcaaactcagaagaaaaataatttagtttgtcaagattgattaaaatctgaggtcgtgaacagggaatttaacacatatgttaatgagaaaatgccaattaaaagttgttaattttatcgctaataagtgaattttttccccatatcccttctgggcttactgtgttcagtttttgtcagcgtctcataagaaggctatttttatttctattagagagacagctatgatggcttggataatcaggatggatgggaatgaggagcttgagaattccttaagttcacctcttaccttggctggaaagttgcaatgattttcatcagtcatgctctaacctagaaagccagaaatccaggaacttccctttttctcagtgtctccaaaggtaaaatggattgggctattcctgatctcattctaccacatatacttcattcagggatggccctggcctagaactttgagaatttggggtgcagattcagtgtttgcaaagcttgagcagccacctgtgaggttattgctatgatgtcttttgtttgtttgtttgtctgttttcattccaccccagcaggagtctatcctcttgctgcagcccagggcaaagaagtggcatgctccataggaatgccttcagaaggacacccccgtcaccccgaagtaggctaggtggaattgtgggaccagcatatcagcaactcgaagaatcaaggatcccagaccaggatacgataccttgccaagggtaggtcttaaaacagcagtggaatttagggagggtgtctttaatgccatagctttaagttaagttttaagttccttggggttttattcattgatttattcattaactggctatatatgcttactgccatctttgttctacaaaaggtgaaccaactttgatgtatagttgtgatggaaaataggtatcagggaaacattagattagaaagaaatataactaggaagaaagtaagtgtagctctctaggcaatatgttattagatcatttgctaatacaactggaaatttgtctttgatttaaaaaatcaaaggaggattaaagtgttccttcatctgcagattagaaaaaggaccgaattctctgataagtattgtgaacaatacgctaaacaataactcatggcatacgtacagtatctgcttcccctgagcttgaatgtagaatttgggtcaatgttgagagtgtaaagtcaaagtacaacttactgaactcatatatgcaagttaggggtagacgggtgggctttggacaccattgctgctactctttacagtgcaaaaggtgtcccttcctctggtggacacagatccatagaggcctcaaagcatggtgagctgagtacaggatgaatgttaaccattatccatgtagttggcataaactgcccaactaaacatgcgatccttgcttaaactgactggaattcaaatcccatctctgctccttactactagtgtgactgtgataatattttatgatgtggtcttagatgctcttatctataaattgagaaaaatagaccagacgcactgcctcacacccatagtcccagcactttgggaggctgaggcatgcagatcacttgagctcaggagtttgagaccagcctgggcaacatggcaaaaccccatctctaacaaaaatacaaaaaattagctgggcatggtagtgtgtgcctgtggtcccagctgcttgggaggctgaggtggcaggatcctttgagcctcagaggtggaggctatactgagtgcacatggtgctactggactccaacctgggtgacagagtgagaccctatctcaaaaaagaaaaaaaaaaatacaaataattgagtaaaataatatcaaccccctgaagattgttgggcagatttttaaaaattatgtgtgtaaagagtttgtagtagacacacagtaagcagagaagtggtactggtatttattgtcacagtaattgttataattttttcagcaatttcaagtgcaatgcaatcagggtttactctagaaatttcagaaatcacttccctcactcaagccaggttcttgtggctctgtttttatctctctgaacgagccaagccaggtttctatgctgctttggcctggatgatttttccagactgtctctatcaggctaaagatcaaaacgggttacgtctagcacagagcctcacgtttctcttttcatatgggcatgggatatatggagcagtgtcctgtctaacaaagatcagcaacagatttcttaaggaaaactggaagataggaaataaatggccggtggctaggttttataattttgaagcaattccaaatggactgtaaaaggcatttggtacagatttagggtgacagttgcaaagtaaacataacagccaaggggttcaaaatgtataatgcgagtcaagaagcagtttgcatttctcttggtcttatctgtggaaaagcaggcttgcatttaacccataattataattgatcatgtttcatagtgccttttccatataaataactaatgatgcctcttattagtgaatatgactatatacatatacataaactccctgggatgaatgttacaagaacaagtgagggaaaatcaacttcagagattttgtgagtggacaaaaaacccagctcatgctggccttttttttctattgggcactgttatgaccatctttccatatgttcgattagtaagggtgcttggagcctgtgccaggctcaagcttgaacaatgcacatatcatcaggggctcagagatctcattacatgttcaggcaatgctttgcttttttaacctcctgggagactcacttattttctgcgtggtggtggttttgttttggttcagtcactgttgggttggaatattctctccagttgcctggccacaggtattttcccatgtgtgatatccaccagatgttgataaatggtgactctaaatataagtcactgtatacccagcacaatgaatctcagggagcaatctcattctcagttcttaaaaacagccattttccactccctggggactgactgtctctctggactggaaatgggattcgtaatagaatttcacagctaaaggccgtctttaaatctggccccagcctggaggagggggaaatgaatttgcaagagccatcagccatctgctccttgtttaccaagcaagtgggcgctgtctatgacagttaggcttccaacgtatgtggcttctttccttggcaagaacttcagcccagcttgaacctaacatcgatcttattgtagcctggggaaggagtgaggtggagaggagattcttgaggaaactttgtcatgactggatccctggtcaatgacagccatggtaatggctcacagaatttgaactgtatcatgtcaggaaaatcaagctaatgtattcatatgccagacaaaaagagatggaatcacaaaagttagattcacaccttaaaagcagataaaattcaaaatgtactgaatacctaccacacctagctagcaactttatatacttctcttcagttattctttagaaattttattgataagcacattaaggatatcagagtttaaatggctagcccaaagtgacatacacagtcctgtgtaaaagagctgcgattgaatactggcttttctgactaaataaaccactaaatcaacaaggaatgtgaagaaaaatcacatttatggctgatgatttgtaaacggaatatctaattttatggcttcagagggaagcgtggatgccttcaaaatagtctgttcattcattttcatgtgccctaggaactgagatggtttggagtcgcctagagaaacacaaattccttagcctgactcatgaatgactgggaaccaaaccaagtgactaatagttggaatctttcttctttaaaagaatgcttcgactcacatagttacagacaagatgcatttgtaatttctttgttgaggatgagaggaagactggcccaaagtgaaatgataagctcatggaccgaacttgtggaagcatcattggccctcaagagatacagaactttgaatcctctgactcagaatcacatctagaaatttagctctcacttaaacttctgctggaataccagtggtgagacactcacatcatgtctggggggaagtgaggcttgccactgtgtctctggtagaacagggcagagacattatttcaattagtcctcagaaaaatttcccctccctctgagcaatcaagttagtgttactacctgattgttttaattgatggcaaaattaaagtgaggctgccatttgtctgagattccagagcatatagtaattttggaacttgaaatcatgtctaattcaaaacaaaatcacagttaggaaagttctcattgtttacagctcatcttcatgtcatggtaacattttaaatttcagttgttaccagtcatgtgttcaaagcctgacttgggaattgacatctaatagtccactgcaattcctctttctcatctaaatcctttagtcagtcctctggcatatgagaagaaccctcaaagtttggcgtgaattgcctttgattatgtcttagtcatgccacatagttgacttgttgaatttatattctctaagatatttgcacctttttccaactgtttagacccaagtgtaagaatttttacctgtcaccatcacatatcaacttaccagattctacctgctggtataccctgatgatatttgtgggaaatgctatcctggctacattttttgtctctgtttcactggtgaacctgacaggcagactttctatattttcatacatacaaatcatgctaacaagatggtgctgagagcgaaacaaaagcctgaaattttttctttacttcttgttgaaattgatttattgattagaacttttaggctcatatttttagctcatatattttaggctcatatttctcatataacactaatgagaatggagtaatattccccaagaatttccaaatatgtagctgtgcagtttgtatgaataaagattacataaccccaaaaagcttttctggttccccttaggatagtcgttcattagcaacctctaacattgatagtaattagaataagacaacttgggtttaaattctctgtgtgacacatactaaagatataattttgggaaagtcatttgagtacctcttagtctattttacgcacccattaaatgataataataaataaactacaaggttttttaaaaataaaatgagttaattggagttgaaagtgatttttacaagcactgtacagatgttagctgttgttattaagtctgaaaatagacattaagtaggatataaagggagagtttaccttgaagatttgtttatgtattcatgtgttcactcagttcaagtgtattgattacaaactctgtattaggcacagtaagagaggatgagcctacaaaggcctaaatctcttccctgtttgtgttcactgtctggtggaaagacctctaatttgctcccatcatgtccttacaataaagatttgtatttagtgtgcaacacactgcattgcaattattatctacatgtataaacatgattttcatttacataataatggcagtcgaggaaaggagatttattgtatggaaggttgatatgtttaaattgtgtcaaaatttgaatgtttactgtttaaattagggacaaataactaagaaatagaataaaacactactgttcaagttccaaaaccccatttctataaatctgctgcgtacctgtcccattttctgtcatggaacagcacagaggagacagatttactagccctgcacaggcaagaagggaacttagaagattctgctatattcaaatgacttgtgatggcatattggcattcttgacaagcccttgccatggaccaaagaactaccttacttggtttcttggttacttggttgtaaggaaagatgctagatgggtagaagccctgtggaacccacttcatattcatccccaggcaggtagaggaattgttagcctcccattcccaccggctggctcagcaatctggcagtgaggtggttcctttagagcacagtgccagtggaaattggatttggatcccctaaaatcagtgtgaagcagaaaaactcttgattgtagtacctggatgcttaatattgggcttcttgattggcttcgactagggtggccacaacaagtctactggactaacccagggctgagagggtggtcgagttgatggagtggactaatgccattatgggtgtcctgtttgtcacaatggaaaggccacacttacctgctcaatccccatttactttgtattctaggatagaggtcaggaagactatatcccacctgcctatacagctgtggtgtgttgaaagacccctggacttaaagtaagaagatctgggtttgagtctcagtctgtcacttattttctgtgtgaccttgggcaagtcacttcacctatctgagcttcagtttacttctctgtttaactgggaacctattatccgtctcatggggttgctgtgagaattcagtgagatggtgcatgtgaaaagtgctttgtggattgagtattgctctaacaaagcctggtagaaagcagaaggagtaacactgtgtttctttttcaggtattcatccagtggtttaaaaacccaacgaaatacatcaataaatatgcaactgccttcaagagagacaaacccctattttaatagcttggagcaaaaggacctggtgggctattcatccacaagggccagttctgtgcccatcatcccttcagtgggtttagaggaaacctgcctgcaaatgccagggatttctgaagtcaaaagcatcaaatggtgcaaaaactcctattcagctgacgttgtcaatgtgagtattccagtcagcgattgtcttatagcagaacaacaagaagtgaaaatattgctagaaactgtccaggagcagatccgaattctgactgatgccagacggtcagaagactacgaactggccagcgtagaaaccgaggacagtgcaagcgaaaacacagcctttctccccctgagtcccacagccaaatcagaacgagaggcgcaatttgtcttaagaaatgaaatacaaagagactctgcattgaccaagtgacttgagatgtaggaatctgtgcattctatgctttgctcaacaggaaagagaggaaatcaaatacaaattatttatatgcattaatttaagagcatctacttagaagaaaccaaatagtctatcgccctcatatcatagtgttttttaacaaaatatttttttaagggaaagaaatgtttcaggagggataaagcttaccattaaagcttttgggtagaattctgaatccaatttcgtttagtcccaacactgtcctctttggctcttagaagatgtgggcaattcagacccttggccccacagtgccagtgtctcattaaaaaacactggcagttacctggtttcaaaaagaggagagctgcatcccgcaggtggatgcaccagtgagcaggtggctcttgccatttggcttgccagtcccaagccctaaatttctattcacccaatagcctcatcacaggttatgtcatgtcgacacatgtagtgttttctatttgatttttggagaatgccacaaaagactctgcaatgggaaggaggacaggagatagaaggagaaaccgggggcaatcttaactactcttgtgtgccaccttcctctgagatttgaatgcacagatctcagctggaggtatgaaattattacagaaaaagagacaaaaaaatccttatatcgtgtcactaaaatcatgctaatagaaatgtttttccttgagattgtttagaggctctggaggagcgtttctcagtttttgtgtgcctgtgtgcacatgtgtgtgcgagcgtgtgtgtgtgtggacttgctcacgcgggcacatatgctgtaagcacatgtgttcattgtgcgtatgtgtgtgcatgtgtgcgcgtattacgcttgctaaaatttgttctgaaacatcagggaatctactattcagaaaaattatttccctcttagatcttttcactttaaatttttccattaagtataaagttcagttagttcttaaatcaaggtcacttgcatggtggggtcgtataaaactcttgacactgtctagaccattttctgatgtgaatacttttgagaggatcaactattggctcattaatgatatcagtatcataaggtgagttcatcaaggatgtgtgtttattttgaatcatgcctacttaaattattaatacaagacaattaacaaattgacagttaccatttgctttctcatcatcctcattaccatttattttatagcaagtctgctatgtgtggaccaaggcttcggcttctgtggttagtatgggaagaataaattgttgaaataaaaatacccagactattcagttcacaagaagccccccaaaagaacagtaaattgtgttgtatgttcatttggaataaagcaatatttttaccactgctaaggtgaactgaaacctctcctgaagatttgtctgtttatttaccctcactttcatgggacatatgaggaaattagtgttcacatatccagtctttttccaattattggtggtgttgagttgttatgtttacactgttttaaataaaaaggcaccgtatttgaaagc

SEQ ID NO: 14 - DNA, 61352 bp, Homo sapiens
ggctagtcccctgaaggggaaaagaggtaacaccttgggaaccatagcatggctgtgtttactgcttgtggactgagcagaagagaaagcaagacagtatcatcactttatagatgaggaaaactgatggtcagaaagattatgtagcttgcctaaggttgcacatttggtatgattttacagaactagaatccagctttttgaattcaagggtggggcaggaaacagctaggtcagtggcctaagaactccggacgggtgagatttggggcagacagcaggggtagtcaccctacaagagtcacgccaagtgcaagcactcagagacatctcccaacactcaaaacagcaaagaagttctggtgctttaagtgttcctcgctcggctcagagactcggcttcgagccgcgactcaagacagcacctgggggtatttgttttgcctaagcctgctgcacttccacggccattgaatcccaaaaactacaattcccattatgcaccgcgagttcgcggactaaacaggcataaactacaagccccagaatgccttgggcgagacgcgagagcacggaggagcggaggggcgtggccacgtcgaccgcgcgggaccgttaaatttgaaacttggcggctaggggtgtgggcttgaggtggccggtttgttagggagtcgtgtacgtgccttggtcgcttctgtagctccgagggcaggttgcggaagaaagcccaggcggtctgtggcccagaggaaaggcctgcagcaggacgaggacctgagccaggaatgcaggatggcggcggtgaagaaggaagggggtgctctgaggtaggtacgggagaaagctgctgggggctgggcctgagaggacacggcctggtaggtaatagaaggctccgctcggagcagtcgagggggagatcggcaccgtcagaacagaccccaccggagcctccttccttttggagtagaatgccggaggtggaggtgaaaacgcagtggactgagggcacgtgcgaatcctgccgcatccagcttcaaagcgaagaaggctgcgggaccccagcggaacaaagagtttggaagttgcaatgttgtctgtttgtaactcagctcagccacctgctagttgtttgaccttgggcaaatcgtttgtatggaaaatgctgatgttaatgctgccttacgtggttctgggggaattcaaagtatttgttaagtaactgcttccaaataagcgctcaacaaatggcaggtgctatgccaatagcacagagatctgaaagcctttagccaatatcatagagatctaaattatgccaataacatagagatctaaaagcctttttctgcatgtttgcggcttttccttgtattaaaaaaactatattgcagttctaggttggaaatctgtatgtgttttcactgtggtgcccgcaatacctagataagtgctatgtcatgggctctttcattcatgtaacaagtatttttttggctaagctctgagtgcagcaaatatacagacacaaaaatctcaaccctcatgaagcttaagttctggcatgggatgaaggtgggggagtcagacaataaagacaaactgttaggtggagatgtggtcagtactaaaaaaaataataaagcaactgggtgtagtgaatattgggggtggggattggtgcaatttaacttgaacactggagtctcactgaggagatgtcactttggtcaagacttgaaggaatctcaaaagctagaggttctatatctgaggagagtacaaaggctgagggtgagagctaggggaggaagttgcacctggcatgtccaaggccattgtcactggagcagaattaactagaagagtaaaaggatattatgtaaaaatggtgaagatgcagattgtaaggacttagcttttactctagttgtaatcaaaagtcattggaaggttttgagcaaaggaaagacataatctgacttgggtttaaatggggtcactttggctgtagtgttgaatacactaaaggcagcaaaggatggaagcaagggacaccagttaagaggttattgaaataattcagctcaaaagtgagttgagccaggtggaaaacagtggagatgatgataagtggttgatttctgtatatattttgaaggtagaaccagtaggacttgctgactgactgaggggtatgagaagggcatcaaagttggcactaagatttttggcttgggtaactgaagaatgggattgccatttatttgagaaagaggaagactgtgggaggagcaggtctgggaggaagtgggggcagtcttagctcaatttgggatatttaactgagatagtgtaattcactatttttaagagcaagagaagaaagttcagatgaattcaacaaacagggcataatagtgttatatctcgtattagatcatgggcatacaaaaataaatggcatagcccttacctttacagagttcacacaatatagagcaggtcctggtataacatcgtttcgttataatgttgatgagaaaaaaaatcaattcattgcggggctgctgtgtatgtggagttttcatgttttccgcatgtctgcatgggtttccttaggtactccagtttccttctacatcccaaagatgtgcctgttaattggcgtgtctaaatgatcccagtctgaatgggtgtgaatgtgatgctccctgtgatggagtggtgtcctgtccagggttggttcctctctgagttgctgagatgggctctggccaccctcaaccccgaactagaataagtgagttggaaaatgaatgaaggaatgaatacaaattactgtaaaataaaaatctgtaaaggctgggagcggtggctcacacctgtaatcccagcacttcgggaggctgaggcaacaggattgcttaagctcagcggttcaagaccagcctgggcaacatagtaaggcctgtctctatttaaaaagtttatataaagtgtgtatgataatcatataaatgcatgacaataaacaatgccttatgaaagtgcccagcatgcccactatagtgttactatttgttttttgaactttgtggtggtaggaggtacttcttgaaattttcactctcaaacatttattccttgagttaacccaccaacactatgactgcagtcattcactgattcgccaaaaattgggtaaatgattattttttgttttcattaaatgttcttaagtgtacggatagctcacatttatttcaatatttagtattaaaaatgtttgtttcgagtctttattcagaagtttggtgacgtttttgtgaccagaaatatgccataggaacttaacttttgtttatgtcgatcagcctgtggtaaaattggttttgttacatgtcattttgattaaagtcatagtttccaagaagctgtctccaacgagttttcagtgctcatctagactgaagtcacatataactttcactctatttcaaagattagtgccaatgtgtctctctttttgttttaagtccagaggtaatgtctcttagaaatagtcttctatctaaccattgcagggctctgaattgcagaatacgtaatgggaattacctccaaaacgtttcgggggttttctcagtaggcttgctagaattgggtgtgaggatgcagggaattgtgactagtaaactgtgtttgtttgcttctgcttttagctacttatatgtacaaacttcagttttgaatcatcattgaaacatgggacattagtctcacccacactttgctaattttaatgttttttttttgagacagggtcttgctctgttgcccaggctgcagtgcagtggtgtgatcatggctcactgcagcttcgacccctgaacccaagcaatgctcccacctcagtcttctaagtagccacgaccatgggcgtgtaccaccacgcctggctaatttttcactttttgtagagatgggggtcttcctatgttgcccagggtggtgttgaactcctgggctcaagcacttctcctgactcagcctcccaaagtggtaggattacaggcatgagctaccacatccggcactaattttaaattaaactagatgatgcattcaatggtaggcatagaattacttgttgcctttttgtctactttgccaaatttataacacttttgttcccttcttttctttctgccttaagccctattcatttttctttttttttttttttttaaagaaagaggcagggtcttgctatgttgcccaggctggtatcaaactcctggctcaagaaatcctcccacttcggcctcacaaagtggtgggattacaggtgtgagccaccgcacatagccatgccctattcttatagtactgtctacgatatccttgccaagttgtcttctatcaggcaatactgtagccataaacttgaaaaacagctaacaaagaagcttaggcatataataataataataattatgtgtcagtccactatattcaacccaagaccatgaataatcacctttcggaagacatttacaataatctagtgctataatagtcaatgttggtatgagatttacatttgtttccttcttcacagtgaagccatgtccctggagggagatgaatgggaactgagtaaagaaaatgtacaacctttaaggcaagggcggatcatgtccacgcttcagggagcactggcacaagaatctgcctgtaacaatactcttcagcagcagaaacggtgtgtagaatggctgagtctcaacctgtcgtcattcatcctaaatgttgtagataacgtgggtgtggatccatgagagatggcataatgagtacttttcaaaaattggtagtatgagaatctgttctctacctgctttcgtatcacatgacagctatctgaagatgtcctcaggtataattaagaacaagggctataggatttcatttcactgtggtgcagcgaaactctttttatcaatagaaatacattttatacagggggcagtgataagcatagtaaagcaagtattatattgcaatgcttcccaaaagtattatgttaggaacttatttttgagagtatgacaaaaaaagaagtggtctccaaagacatgtaaacctcagaacaattgaatttataccagaaagttctcaataattttaacaaactctggataaataaaagctgaaaaatactcttatgttattcaaatggacctgtggatctcctttaactaatacatgttttgataaatatgctttttaaaaaaaaaggtaaatcagagtatcagtttctaccttcaatctctgacaaaaagaaatactgccattactggcaaaatatcataatttgggattataatgcaatgactattcttattcatctctttggattttttttttttttttaatatgacagggtctccctctatcacccaggttggagtacagtggcctgatttcagctcactgcaacctctgcctcccggttttaagtgattctcccacctcagcctcccaaatagctgggattacaggcgtgcgccgccacgcctgggtaatttttgtatttttagtagagatgggtccttgccatgttggctgtgctggtcttgaactcctgagctcaagtgatccgcccaccttggcatcccaaagtgctgggattacaggcgtaagctaccgcactcagcctcattcatcatattttttcatgttacatgcatcagtagattgctctttttattgctgaataggatttcatttatttattcaccaattgatgaatatttagattcttccagttttgtgctttataaataatgttgctatggacattcttgaacaaggctttttgtagacataattttctctctctctcttttttttttttcttttagagacggagtctcgctctttcggccaggctggagtgcagtggcacgatcttggctcactggaagctctgcctcctgggttcacgccaatctcctgcctcagcctcctgagtagctgggactacaggtgcctgccaccacgcccagctaattttttctattttttagtagagacggggtttcaccgtgttagccaggatggtctcgatctcctgaccttgtgatccacccgcctcagcctcccaaagtgctgggattacaggcgtgagccaccgcgcccagcagtagacataattttcatttcccttggagtggaattgttggaccatagaatagatgtatgtttaactgttgaagaaactggtttaccaaggaggttgtgacattttacatttctaccagcaactcatgagagttcatttgtaccaaatccactccagtatttggtgttgtcgatctttttcgttttagccattctagttttgtggagttgtgtctcattactttgcatttccctggtgactaataatggtgaacgttttttcacatgctttttggccttttgtatatcttcttttgtggtgtatctgtttagatattttgcccagttttcaaattgtgttgtaggggttctttatttacttttcccaggagtatagattcaagtttccctgattcaagtttcaggagcatagattcaagattccctgaatctatgctcctcagtaggggttctttataaagtctctatactagtcttttatcaaatatatgtgttgcaaattttttttccctcacccatggctgtttattttctgggtgtttttttttttttaaactgcttagttttaaattttgatgaagttcaattaattagtatttttcttttatggttagcattttttgtgtcctcttcaggagacttttgcctaccccaaagtgacaaagttactctcttatgttttcttttactagcttcattttagctttttttttttttttttttttttttgagacggagtgttgctcttgttgcccaggctggagcgcaatctcagctcactgcaacctccgcctcccgggttcaagtgattctcctgcctcagcctcctgagtagctgggattacaggcacgcaccaccacgcctggctaattttttgtatttttagtagagatggggtttccccatggccaggctggtcttgaacttctgacctcaggtgatccgcccgcctcggcctcccagagtgctgggattacgggcatgagccactgcgtccagccaagcattattttagcttttatgtttaggtgtatgatttttcttaaatttttccttgtatatggtgtggggttggagtaaacaagtttttttcctctcatatgggttatctttctagttgttctgcctcatttgttagatttttttttttcctttcctcactgaattgcgttggggcccttttcaaaaatcatttgaccacatatgtgtgggttatttctggactctatattctgttccattgatcaaattgtctgtcctttcaccaataaaatacactgttttgattagttttacatagcaagtccagcagagtgagttctacagcttttgttcttttcaaaattgctttagttattcttggtcctttgcctttgcaaacaaagtttgaaatcatcttgtcaatttctagaaaagagcctactgaaaaagaaaaaaaaaaaaaaaggctgggcacggtggctcaagcctgtaatcccagcactttaggaggccgaggcaggcggatcacctgaggtgaggagtttaagaccagcctgaccaacatggagaaaccctgtctcaactaaaaatacaaaattagccgggcgtggtggcgcatgcctgtaatcccagctactcgggaggctgaggtaggagaatcacttgaacctaggaggtggaggttgcagtgagccgagattgtgccattgcactctagcctgggtagcaacagcgaaattccgtctcaaaaaaaaaagaaaaggaaaaagagaaaagaaaagagcctactgggattttgattacattggtttgaatctatagatcaattggtaggattgctgatttttatcagtagtgccttagattttattgttttaccatttctgcagataatctcattatttcacactttaattgccatattagcctcataactgtggtcccttcttctaatgcctggctatccttataaagttgcttgattaatctttctgaaatcttatatttaagatgccctccaattaaagaaccaatagtggctggagtagatggaatccaaagtctttaaatttacatttaaagcatgtgcttcttacttctccaggggtctccatttgctctcggtactgactttatgttatagcttagggttcactcaccttcctttggatgagctcttccaccttcgtaattttattcaatattagtttccctctgtcttgaaaaaactgtttttctttcaaattccatggttctttcagagtctcaccttctgaggctgcttctgtgatacctccttttgacttaaagcctttactatccattcttggcaactgtaatttagtatcctgctttgtattactagttcatttttcatttgtgtactttgtttttcttattagagtataaattcccatgtgtcagggactaattatttttagatcaaacataactgcttatccaatttttattaatcattatccaaattctggcttattacctaattcttcccctctattctaactggtcagtcttaatttggtcttagccctctgcctttcccagctttttatagtcatattttaccctttttttgaggtattctccaaattatttatagtattattcttctctgaccaatgttacccatggaagttttttttgaactttaaaattcttatttatatatttgttcatgtgtgtaaaccctttacatttaagactagtcaacctaataagaaagtactattattatccccattttacaaatgaggaaactgaaaacagagttttaagtagcttgtccgtgttactcagcttgtgattggtggagctgaatttgaatctaggttgtcttgttccagagttcttaactgctgtgtagtattaatactacttttctgtatgttgtcttgaaatttgtttctctaatttctatatattttctctctcttcttatgttaagtagaatcttaattatttctattcttttttttttttttttttttttgagacagagtcttgctttgttgcccaggctggagtgcagtgctgcaatctctgctcactgcagcctctacttccaggttcaagtgctcttcccacctcagcctcccgagtagctgggattacaggtgcttggcaccacacccagctaatttttgtgtttttagtagagatgaggtttcaccatgttgcccaggctggtctcaaacttctaacctcaagtgatccaccccacttggcctcccaaagtgtcgggattacaggcatcagccaccatgcctggcctttttctattctataacaaacccataaactctagtgcaataatttagatcaatattacctacttattacatgaataaaaatggaagtgatacttgttcattggctgttgtcactattgcatatgctaactttttctgtttacatttcagggcatttgaatatgaaattcgattttacactggaaatgaccctctggatgtttgggataggtgggtctttttatttcacaaggacaatagaaacattaacagataagtccttatggccatgtttctcaaattggggtatatggagtgtgtgtcagagtagacagtggtgtcctgggggcacagagatccagaataatcataatatatcttcctgaggtgtttaagattcaagaaatttcaagtttatgatgtacaactttgaactacacccttctatccctatcctcagttttccccagaagcatgtactagagatactttggagaagtttgagggatacaggcttagggtatgtcattgaggacctcaaaagaaacatactttacttctgctaaaatccagaatgggtcttggagcaagaacaaaagtacatgttcaatttaaaatgtgttcttatctttttcctcccatttaggtatatcagctggacagagcagaactatcctcaaggtgggaaggagagtaatatgtcaacgttattagaaagagctgtagaagcactacaaggagaaaaacgatattatagtgatcctcgatttctcaatctctggcttaaattagtaagtctttctcaagtgccatctgagttttaaatattaaactaagagattttctctagaggtatctggtataccaaaaaaaaagtaaaacagccattttgaaccatttagtagattggaaacatttaataaatatgcaatacttcttaaattggttctacttaaaggtggacttaaatatagtataataaggtattttcgcccttttaagattgatcgcaaagtctgtagatctctcagtgagtatggattaataatttattttatattttgaaacaaggtctcactctgtcacccaggctggagtgcagtggctccatcatggctcactgcagtctaaacctcctgggctcaagcaatcctctcgcctcagcctcgtgagtagctgggactacaggtgctgtgccattacgtccagctaattttttaatttttaatagagatgacttctctctctgttacccaggctggtcttgaactcctgagctcaagccatcctcccaccttggcctcccaaagtgctgggattataggcgtgagccaacacccctagtccggattacttatttatttattctaaacataactgggtgcagtgtttcatgtctgtagtcccaacactttgagaggctgaggtgggctgatcgcttcagcccaggagttcaagactagtcagggcaaaattggtgagaccccatctcataaagtacagaaattaaccaggtgtggtggcacagcacctgtagtcccagctactcaggaggctgaggtgggagggtcgcttgagcccgggacgtccagactacagtgagctgagattgcaccactgtccgccagcccaagtgacagagcaagatcctgtctcaaaaaaacaaccaaaacagaaaaacataattgggccattcaactgtactggaggaggaggtgcaggagctaacatttggcagcagtgtggttgtttggggaaaaacttccctctgtgattctggtatccctttcactcctttatgaaagtcatcaacacaaagaagtgatattttagttttttattggtctttggacttttttcacctagtatattgctacagccaaaaatgtctgcctcagctgggcatggtggctcatgcctgtaatcccagcactactttgtactgtcttacttgacatgtaggaaaaacatattttttattaaaaaaatgaccaccgtttgttagacattaatattactgcttttattctaaaataaatttaaaaaaataaacaataaatatttggaattatttacaaccaccacaatatgatgaaatattgacattaaaactgataagatttcttactaaaataaatctcttggcattaaaactgataagatttcttaataaaataaagtaagaaataaatttcttactaaaataaagaaataaatttcttactaaaataaagtaataaagtaagaaataaatttcttactaaaagtaataaagtaagaaataaatttcttactaaaataaagtaataaagtaagaaataaatttcttactaaaataaagtaataaagtaagaaataaatttcttactaaagtcttaaggaggactgattttaaacttccaatacagttgacccttgaacaacacagggcttaggtgtgcccacccctcacccagttgaaagtctgcatataacttttggcccccaaaattattaatagcctactgttgaccagacgccttaccaataacataaagttgatgaacacatagtttgtatgccatatgtattatatctttttttttacaacaatcttagctagagaaaagaaaatgttattaagaaaattataaggaagagaatgtatatttaatagtcattaagtggatgattgtaaagatcttcatcctcgtcttcacattgagtaggctgcggaggaagaaaacgggttcgtcttgctgtctcacgggtggcagagatggaagaaaatctgtatatgtgaacctatgcagttcagacctgtgttgttcaagggtcaactgtagttacaagtatagaaaattaggtaaatcctgaagccatgaggtatcttgatttcctcaggacattcgacaaatatttttacatccttagtgaaaggttggagaaattaccctatggatattagttacagaaacttataatgaagaatggcacccaaagaatgctaaacagatttgttagcctggagtctgtggaccctggtggtgtaacaatggattttgtccttcatttgtcactagcctaaataatatctttacatgtaatttattataagattggagactgggtgtggtggctcccacctgtaatcccagcactttgggaggccaaggtaagtgtatcatctgaggttaggagttcgagaccaacctggccaacatggtgaaacctcatctctactaaaaatacaaaaaatgcaaaaattagccgcacgtggtggtgcgcacatgtaatcccagttactcgggaggctgaggcaggagaatcgcttgaacccaggagacagaggttgcatgaactgagatcatgccactgtactccagcctgggcgacagagcgagactcagtctcagaaaaaaagataaaaaaaaaaaaaaaaaaaaaagattggactagctgcacctctaaagtgacttttaatcccaggattctatgattatatttaattggagttgttaaaagtaacaattaattagaataatttatctgtttatttttgataacctggtgcttgtactgaagaagaataatatcatgaagtaaaaagcataatctagatcagtgctactgaaagaagggtttgcatactgtttgagataagttcaaaaattgaaagtgagcttttggaaactttggtaacaatttgatattgccgggacatccaagcacatcatcattctttgagtaacttctgtttttattgtactttatatcagtccataatggaacacacacatacacacaataaaactggccccttcgccacagattttttgagaagcacgggtatagacaaccatcaaattcaaatgatcagcactagaatgatcagcaataatctgaactttgtatgtggctaacgaggtacatattaaactattgctttttctttgtgggtctggtcaagaggagtaacagatgaattcttcacactactttctttcgctttgcagaaggatttctccagtcagttattttatgtgactcctacagtctagctaaggaaaaaattgtttctggaaaacttctggtatttttatttaaaggtataaaattattttagtttggcaatttaagggttaccaaaaaaaaggtttatttaacttttagatctattaatctaaccatatagtccttttatttatgttatttcttaagtgatcttattcagcactctgaataacctgatctttactggctgtcccacgcacaagaacaccagaaccattcagaaagctctcaaaatagtgaaatcaatgttaagctatatttatgtagtgacagatatcaaagactggatcttatgctggtagcacattcagagttataacttttcttgaaacaccaccacatatgagaaaacatcactaatttaaataagcaagaaaaatccatttactgaattactgcaaaattaaactataaaatactaattatttttgttaaagatataaataaaacattccatttatttagcatttgttgtactagaccatgattaagggctggcatatcatagcaatgtcttctgagtttgtagagcttagtttatctgaaagacaaatatgaagccattaattgtaactgtaacagagagaaaattacgagttctataggaacaaatacaagacggacttaacctgggctagacaattaggaacagataaataggagatatttggtaaagtaacaaatggtagcttctctagtagtaacagaactcctaactagaacattgaaatgctatttttgaccaggcatggtggctcacacctgtaatcccagcactttgggaggccgaggtgggtggatcaccaggtcaagagatggagaccatcctggccaatatggtgaaaccccatctctactaaaaatacaaaaattagccagccgtggtggcgggcgcctatagtcccagctactcgggaggctgaggcaggaggatcacttgaacctgggaggcggaagttgcagtgaggcgagatcgcgccgctgcactccagcctgggcgacagagtgagactctgtctcaaaaaaaaggaaaaaaaatgctatttttatgtgaatttagggattgtttttaatagcttctaatgctgattagagtctggtggaatgagtatttttgcgaattattaaattttagcattaacaatttttacaaccttctcagaaagcaatttgttaccttttaacatagttctaggaatttctcttaagggaataatgtaaaatgtgaaaggttgtatgcatgaagttattttttatagaattatttataattgggcaaaattagaagttgtttaaatatccagaagtagatgaacaattaaattatggaagctctattagatgaaacatgatgcattcatttaaaaataatagtgaaaagaattcgaggttgcagtgagctatgattgcgtcactgcagtccagcctgggcaacagagcaagaccttgtctgtagaaataaaaaaaaattaaaaataatggttaagtgtaagcagcagcgtggaaaagtgaatgatgcagtattatagtggaataaaagcaaattttattatgatcaaaactttataagataatacatatcctttcatccttaagggaaaaaagactgaaaaaatttatcaaaatgtttgtgatgtgaggtttttagtgatattttcctccctcttgctaatagaattatctacattgtatatggtctcataatgtcccttctaaaacacagatttgactatgtcattcctttgcttatcgctcacccaccctaacacatacaacaattactattaggcagattcaaaattgattagcttgatattcaagacctatcacagcctttttctccagacaactatctagcctggacccctacataacttttaattttctgtatctttgcttatgctattttctctggctgaaatacccttcccttcccattttccacctgataaaagtccatttctccttcagggctaagctcaaatgttaaccccttcctcccccctttttttaattttctttagagacagggtctcactctgtcacccaggctagaatgcagtggcaccatcatagttcactgcagcctcaaactcttgggctcaagtgattctcctgccccagcctcctgggtagctaggactacaggcgccttccaccatgcccagctaaagttttaaattttgttgtagagacagggtcttgttatgttgcccaggcttgtctcaaactcctaacctcaagcgatcctcctactcctacctcggcctcacaaagtgctgtaattacaggcagaagcgactgcacctggcttattactccttcttgaagcctttactctccaactcttcttacaaatcgctcagttttgcctcttttttaggtcctcccagtatggtccttatcacattgtaataatagatttttttttcaatacaggaattgcatgtagtatctccagtgattgtttggcaactaataggcattcaatacgtgagtagaaattggttaactgttaacacttctgttacaggggcgtttatgcaatgagcctttggatatgtacagttacttgcacaaccaagggattggtgtttcacttgctcagttctatatctcatgggcagaagaatatgaagctagagaaaactttaggaaagcagatgcgatatttcaggaagggattcaacagaaggctgaaccactagaaagactacagtcccagcaccggtaaactttctttggagcttgtcttaactctaaaaataatagaaataaattatctcttttttgcatctgaataaagtgctttctggtggattggcatgttaagtttacttagttactattcaatttttttaaagatatattttaaaaattttatttatcatagagtaaaatccactctttggtatatggtactaggagtaaaaagacttgtgatcatcatcattaacaagatacagaataatttcacaccccccaaaagaattccctttgtaattagtacctatgctgaacccaaacccctggcaaacactgatttattctccagcctgtggttttgccttttccagactgccatataaatggaatcgtataatatatagccttttgagtttggcctgtttgatttagcataatgcatttgagttgtaaaagttctttatagattgtaagtataagcctttgtcagatatgtgatttgaaaatattttctctcagcttaagcctggtctgttcattttcttaactgtcttttttagaacagaagtttttaattttaaagaagtctaatttacaagtttttcttgtatggatcgtgcttttgatgttgtgtctgagaattttttgtctagccaaagattgttacagagattttcatcttcaagttttcatcttcaagttttataatttcactttttacatttagatccctgatccattttgagttaatttttgtagaggatagaggttaaggttcttttttagcatattaatgttcatttgttccaatgccaattgttgaaaagactaacctttctccattgaattgcctttataccttgatttttaaaaaatcagttgatcatattcatgtaggtttatttctattattctattttttctaccgatgtacgtgtctatccattagtgtttaccatgctatctagattactataccttttatagtaagtctagaaatcagataaaatgagtcctctaactttattcttatatttaactctggtagttcatttgactttctatataagttttagaatcagctttctgggattttgattaggattatacaggaatatggtataattctccatttatttaggcttttttttttttaagtaaactttggtagatttttgtctttcaaggaattgatccattcatccaagttaatgagtttgtgggcatagagttgttcataatattcccttattatgcttttaatgtctgtaggttatatagtgattctccctttctcctgatactggtaatttatgtcttctcagtctggcttggatatcaattttactgattgttttagaaaaccagcttttgggttcatttcattgattttttttttttttctcttaatgattttctgttcttaattttatttctgcactttatttcttcccgcttgctttggatataacttgctcttctttttgtagtttaaggtgaaagcctagatcactgattctagacctttctctttttctaatataagcatttaatgctctaaattcccttctaagcactgctttagttgtatcccacaagttgtgatatactgtattttcattttaatttagttcaaaatattttctagcttaccccgtgtcttccttttgacccatgagttacttagaagtgtattacttcagttaggaagtgtttttggatttttcagatatctctgttattgatatctagtttaattccatagtggtcagagaacataaggtatatggtttcaagtcttaaatttgttaaggtttgttttatcacccagattatggtttatcttggtgaatgcttcatgtacacttgaaaaatatgtgtattctgttttttagagtgtaatattctgtaaatataatttagggcaagttgactggtagtctgttctggtcttctgtatcattgatgactttctgtctacttgttatatcaattactaagaagggttttgaagcctctttgtgattttgtctatttcttttagtcccatcagttttgcctaatatattttgaagttcttttagatgcataaacatttagaattgacccctgtatcattatataatgtctccctttatccctgataatactccttattcagaagtctacctggtctgatattagtacagctattccagcttcctttttgtttgcatgatacatcttttccctttctttactttttaaaaaccacattaaaaaaaaaccactcttagagttgtataatcatcattacaatctaattttagaacatttttaacaccctaaaatgaaccccatgcccattagcagtcactctccattcctacttacctcgctcctaggcaaccactactctgctttttgtctctatggatttgcttattctggacattttagttaaatggaatcctacaatacatggtcttttgtgattggcttcttttacttagcatactatttcctttttttttttccagggagggaagggtggaacagggattttcagcatactgttttcaaggttcatcataaatgaacatagttgtgacatgtatcagtactttattcctgtttattgccgaatgatattccatcatatgaatattatttatccattcatcagttagtgaacatttaggttgtttgcaccttctggctattacaaaataatactgttatatttgcgtaacaggtttttgtgtcattttctttttacccttttgttaagctagttgaatttagcagtggagggttatataccaactttagtgacacttatgttaattagcttctttaacttttaacctatgtctttatattttttaagtgggtttcttatacacagcaaatagttgggtcttgttttttctgtgaactctaacaatatcttttttgttatgttgagaccatttaatagaatttttaatattgttgggtttaggtctactattttattatttgttccatgccttttgttcctcttcagcctctttcctaccttcttttggattatctgagtgttttttagtatttcattttaatttgtgttattggctttttgcctcttacaactttaagtggttgctataaggtatataatatacctaaactttcacattctacttaatgttttaccatttaaagtaaaatacagaagctttataaccataaaagttcctttatattccctacccttttggtatacttgtcataggtattacatctatatgcattgaaaaccccaccagacaatattttgttttgctttcaaaagccatatatatatatatatatatatctcttaaataacttaggaaaatagtctgttgtgtttacccttttttttgttgttgttttttcttcattcctgaagctccaagttcccttctagtatcatttcccttcagtctgaagaacttcttttagccactttcttttagagcaggtccgttgtcaattaattctcctagtttttcttcatctgagaatgtcttcatttcatcttctttcctgaaaaatatttttactggatatagaattctgggtcaacgtttcgtttcttttttttttttttttttttgagatggagtcttgctctgtcacccaggctggagtgcaatggatggcacgatttcagctcactgcaacccccacctcccaggctcaagtgattctcttgcctcagcctcccgagtagctgagtagctgggactataggcatgcgccaccacacccggctaatttttgtagttttagaagagatggggtttcatcacattggccaggctggtctcaaactcctgacctcaaatggtctgcccaccttggcctcccaaagtgctgggattacaggcatgagccactgtacccagccaacatttcttttctttcaccactttaatgatgttatcccactgtcttctggcctccttggtttcttttttctttttctttttttttttttttttttttttttgagacggagtctcgctctgtcgtccgggctacagtgcagtggcgcaatctcggctcactgcaagctccgcctcctgggattacgccattctcctgcctcagcctcccgagtagctgggactacaggtgcctgccaccacggctggctaatttttgtatttttagtagagatggggtttcaccatgttagccaggatggtctcaatctcctgatctcgtgatgagcctgcttcggcctcccaaagtgctgggattgcaggcatgagccactgcgcccggccctctctggtttctaataagaaatctgtagtcatttagtagttcctgacctatacataatgtgttgattttcctctggccttgtccaagattttttcttgtttagttttggttttcagaagtttgattgtgatgtgtctagatgtgatttttttttttttttttagacagagtctagctctgttgcctaggctggagtgcagtggcacgatctcagctcacagcaacctccacctcccgggttcaagtgatcctcctgcctcagcctcctgagtagctgggattacaggcatgcgccaccatacccagctaattttctatttttagtagagatggggtttctccatgttggtcaggctggtctccaactcccaatctcaggtgatccacccgcctcggcctcccaaagtgctgggattacaggcgtgaaccaccacgcctggcctagatgtggttttctttacatttaatctgggcttcactgggccttttgaatttgtaaatgtatgcctttcacaaaatttgacaagttttcagccgttatttttaaaatgattttttatacctattatctctttcttctttctctctctgagacttcagttgcacaaattttagaccatttcccccgactctgctaccaataatctgtccaaattaaaccttttgatatcattccataggtccctgaagctctgtttaaccatttttctttttgtttttcagattggcccatttttattgctctgtcttcaggttcacttattcttttctcttccatctccatcctgctattgaaaccattcaacataaattttttatttcagatactgtatttttcaattctaaaatttctgtttcattcttttttataatttctgtttctctgttgagaatttctgtctctccattcatttcaaatgtttttaccttcatctcatggaacatagttatattaggtactttaaaatctccaggctgggcacagtggctcacgcctgtaatcccaacacgctgggaggccaaggcgggggaatcacttgaggtcagcagtttgagaccagcctggccaatatggtgaaactctgtctctactaaaaatgcaaaaattagctgtgcatggttgtgggtgcctgcaatctcagctactcgggaggctgaagcaggagaatcgcttgaacccaggaggcagaggttgtagtgagccgagattgtgccactgtactccagcttgggtgacagaatgagactccatctcaaaaaacaaaataaaatctccatctgaaaactataccatctgggtcattttatgtttgcatttgcttattgttttttcctttgaaagttggtcacatttttctagttctttgtgtgtcaagtaattcttgtaccctggacatttatcctgaccatatgttataagactctgatcctgttggccaatattccctggagaatatctatgtttttgtcttagtagacaaccacacttcagatattacaagttctttgtcatcttgtgtggctgttggttccactgtcagttcagttttcaagacctttgctgtgttgctttgggtctgtcccatgcatgtcctgcttaagggttaatctggggcttgggcagtggtttatatcattgttcagttctcaaagccttttctgtgctgctttgaatctaccctgtgcatgcatagctcaagagggaacctaagatgtatgccaattcacatacagaattaggagatcctcttgttcagctcattcctttgcagttctcctcccatattctttggccttcagagtcctcttttcccagtcctcaggccagaaagatggggtttctctgagttttacattcacataccaccactgcaacagttcaaaaccacaagagaaaatagaagaataaaaaaacaggaaacaatcctgcgtgggttgtttcttcaagttttgacccctctccacagtctgcttgcttttgttgacttttcagagccctcagttagttgctttttttgtatatggtctatagtttttaattcctatcagtgagagaaagagaaaaggtacagtgggcatactccatcttggccaacacctgcaatttattctgggttttttggggttttttttacccttatgataatactttttaaggctagttaaatgaagcagtggtaggaatggagaatctcttctgataatacttaaaactgtggcagcagcataggaagtttacttttcaaacttctgccagctttgctaaagtacaatgtcatgtcatatgcaacttcatttcatataggtcaggagaaaccgtatatgtgtgtgcgtgcacgtgcgcgcatgcatgtgtatagaaaaagagacacagtgataaaatagatgtggcacagtgttaacaattggtgggtcaagttttctaataaaaagttagtgggaaaactctaatcttaataaactctgtgatcttagtcttaataaccctaacctgatcctcagatcaacttaatggtgattttcagaataatttaaattggtcaaacttgggcatttaaagggagagttaaataattctagccaaaacttttcatgatcttaaggtgactctctttacttctgagagaataaacatgttctttgggatatttctgcattcttcccccagcctgctcttctaatttgtttactttaacaaattggaaattttgagtctggtaaaatagtggtcacctcactaaaagttgtgcattctgctactttagacaattccaagctcgagtgtctcggcaaactctgttggcacttgagaaagaagaagaggaggaagtttttgagtcttctgtaccacaacgaagcacactagctgaactaaagagcaaagggaaaaagacagcaagagctccaatcatccgtgtaggaggtgctctcaagggtaagtttgttaaacgttatttcggaaaactgttagtttctagtggtaaaatcatgtaagaagataatacataaatatacctgtggacacttctagtttgctgaatactgagtagcaaaaagaaggaagtcaaaggagagctaatattacagtgtgcagtaaaatcaaaatgcatcagtaattttgtgtcttaattaagaaagacctaacatttaggaagcatcaagattttctgagtttgaattgttagttgaaagaagatatgtagtaacatagcaggtgttgttaaagtgaagcttacatataccaaagcctcagagaatgatactaatatggttaagaaccctgccttcagagccctttgggaccagaaattagactctctatatacccaaagatcagcaataattttttttaattaacatggactttttttttttttgagagataggttctcgctctgttgcctgaaacgtggtagtgcaatcatagctcaccgcagcttcaaactcctaggctcaagcagttcttttgcctcagcctcccaagtagctaggattataggtgtgagccactgcatctggacaacactgactattttttagagtagttttaggttcatagcaaaattgagcagaaggtacagagaataataagcttttatttactaaatttatagcagttagacatgtaaaccaggctgtttttttaatctcttatttctttcctggtatcaatttatcaataatcagaatgttacttggtggttctagaattaggatatagggagtgtatggtcccaaaggctatttcatccagatcatgatgaagcttggttaataaccagccccacaacagagaaaacccctaataaatgggttaattttgtattctctagttccagtatatctctgctgatttccattgagagaaaatttaaaactgaagaataaaacttaggttagtttctgataaaactagataatgttataatgatgactgaaggaagatgcagaatgtcttttttggaaatttgtgaataaaagatgtggggtgactggaggagggaaaagaaggcagaatataagtaacaaagaatggataaaacgattctatttttgatttattaatttttttaaagattatttttaaaatttctttttttttttctgttgtagtggaaatactgtccttgagttgaggaagaataggtatactttatctggcatctaagttaataatgaaacattttacatgaggttttaatatttttgctcctagctccaagccagaacagaggactccaaaatccatttcctcaacagatgcaaaataatagtagaattactgtttttgatgaaaatgctgatgaggcttctacagcagagttgtctaagcctacagtccagccatggatagcaccccccatgcccagggccaaagagaatgagctgcaagcaggcccttggaacacaggcaggtccttggaacacagggtaaggactcttagatccagtgctttgctgacacaacaaagacttcacatttagggtagagaagtatttttaccatctcttttaattcctcttgaatatttagccatggtctatatatgctgtctgagaacataaaactatggtaattttagttttcttcttcatctccagcctcgtggcaatacagcttcactgatagctgtacccgctgtgcttcccagtttcactccatatgtggaagagactgcacgacagccagttatgtgagtgtggtttttggatattttgaagtgggaattattaagggtgggcagaggcacctattctacttcccaaaggcagtttcttctttatgaagatgaaagtaaccaggccaggcgcagtagctcacacctgtaatcccagcacaggctgaggcaggaggatcccttgagcctaggtgttcaagaccagcctgggcagcctagtgagaccctgtctctatttattaaaaaaaaaagtaaccagacaaaattttgtatatcctttatgtttgtattcctttgagtatgttagggttaaaagaccatttgttaatattttattaaggaataaacattaattaggtttatattttcattactgaacattgctttaggaaaatcaatggtggctattctggaagatggattgaacatacataaataagctattggaatagttcaggcaaggatattaaggggcggtatttgggcagggtagtggtaatgaaaggagaagggagcttggatgggagaggcttcagcagtagagttagaagatttgtctgatgggataatggggatgtagggaaaagataatgtgatttaaatgagacgttctcattttgtcattgatagtaatgagaaattatgatagttttccctcttatcctgctttttccttctggacatatttttcctctttcttcctaatccttagcatttctgtttttaagaaaaagtatagtagctggtggttaaataaacaagccagcctgagatttagtctaatgcttaacattgcctagttctttttttttttttttttttttttttgagatggagtctcgctgtgtcgcccaggctggagtgtggagtgcagtggtgcgatctgggctcactggaagctctgcctcccaggttcacgccattctcctgccttagcctcccaagtagctggaactacaggcatctgccaccacgcccagctaatttttttttttttttagtggacacggggtttcaccgtgttagccaggatggtctcgatctcctgacctagtgatccgcccgccttggcctcccaaagtgctggaattacaggcgtgagccactgcgcccagccctagtcctaatactaggttgaattctgtcccagtgcaagagttacctcataactaatttataactcccactacatgctaggaatgcaaaaataataattaagattttgagcaaaaattctgcctaagtgctcaggacaaggggaaggctattttttttctttttttttttttctttttaaacagagtcttgctctgttgcccagcaggctgaagtgcagtggcaccatctcagctcaccgcaacctcgacctcctggttcaacgggcatggcagcccacgtttgccatcccagcactttgggaggccaaggtaggagaatcactccaggccaggagttcgagaccagcctgggcaacatagcaaaaacctgaccctacaaaacaaatttttttttttttgagacggagtcttgctctgttgcccaggctggagtgcagtggcatgatctcagctcactgcaagctctacctcccaggttcacgccattctcctgcctcagcctcctgagtatctgggactacaggcgcctgccaccacgcctggctaattttttctattttttagtagagacgggatttcaccgtgttagccaggatggtctcgatctcctgacctcatgatccgcccacctcagcctcccaaagtgctgggattacagatgtgagccaccgcacccggtcaacaatttttttttaattagctgggtatggtggtgggtgcctgtagtcctaactactcgagtggctgaagcaggaggatcacttgagcccaagaatttgaagctacagtaagctatgatcatgccacagcactccagcctgggcaacagggcaagaacctatctctaaaaaataaatcaattataataataaagaaaaatcagcttggcatcgtggctcatgcctgtaatttcagcactttgggaggctgaggtgaaaggatcgcttgagcccaggagttcaagaccagcctgggcaacacagggagaccctgtctccacaaaaaatttaaaaattagccaagtgcagtggcttgcacctgtggtcccagctacttgggaggctagggatcacttgagcccaggagtttgtggctacggtgagctgtgactgcaccactgcactctagcctgagtacagagtgagaccttgtctcaaaaataaataacgaaaataaaaaagaaaatcctatgagcctttatagaaatggataacatacatttgtagatgtctggtttttctaatgtttcaagtcattttgtagaaacatgacttatgttaaaattaatatggtacaggaaatattaaacttattatttttgagacggagtctcactctgttgcccaggctggagtgcagtggtgcaatcttggctcactgcaacctccacctcctaagttcaagcaattctcctgcctcagcctcctgagtagctgggattacaggttcgggccaccacgcccggctgatttttgtatttttagtagagacagggtttcaccatgttggtcaggctggtctcgaactgacctcgtgatctgcctgtctcggcctcccaaagtgctgggattacaggcatgagccaccatgcccgacctaaacttatttttattttaaattcttttccatggatgttttatttgacctctccacacatttttctttaggttgcgttttgcttagtgatgtatagaagctcttcatagatgaagaaaatcagctaaaaatctataatacgagttgcaaatattttccccctactttgtccttgtcttttggcttcatgtagcagtaaccattatgcttttaattatcatacagtcaaatttaagttttctttttttttttttttttcgagacagagtcttgctctgttacccaggctggagtgcagtggcgccgtctcagctcactgtaacctccgcctcccgggttcaagcaattctcctgcctcagccacccgagtagctggcattatagacgcccgccacgacgcccagctaatttttgtatttttagtagagccatggtttcaccatattggccaggctggtctcgaactcctgacctcgagatctgcccgccttagcctcccaaagtgccgggattacaggcatgagccactgcactcagccttttaaagcttttttttctttttttttctaaacttcatcgaaatataattccgtggcttttagtatgttcacagagttgtgcaacccttaccacaatcaattttagagcatttttatcactccagaaagaaccttgtacccatacctgtaagactcgattccccaccattaccccaatccccaccctagcaaccaactgtttttttctctatagataatttaccaattctagacatctcgtgtaaataatataatatgtggtctttgtttttttttgtttgtttgttttttgtgttttagacagagtcttgctctgtcgcccaggctggagtacattggtgcaatctctgctcactgcaaccttcgcctctccagttcaagcatttctcctgtctcagccttctgagtatctgggactacaggcatgtgccaccactcctggctaacttttgtattttcagtaaagacaggctttcaccacgttggccaggctggtctcaaactcctgacctcaagtggtccgcccacctcggcttcccagaccgctgggattataggcgtgagccactgcgtccaggcagtgtatggtcttttctaactggtttctttcacttagggtagtgttttcaaggttcatccacgttgtgacatgtatcagtacttcattattttttattgccaagtagtattccgttgtgtggcttcacaacattttatttaaccattcatcagttgatacaaattttaattgttttcattttttggctattatggataatgctgctgtgaataccgtgtatacatttttgtgtggacatgtgttttcgtttttcttggctgtatacctaggagaggaattgctggatcgtgtgattaactccatgtttaatattttgaggaactgtcaaattgttttccaaaaaagctgtaccattttaccttctcacattcccctaatgtacgagtactccaattccttcccaacacttgttattatgcttttttggttattgtcattctaacagagatgtgaagtggtatttcgctggttttgatttgcattttcctggtgactaatgatgttgagcctattttcataggtttattggccttttgtatatcttctttggagaaatgactgtttaaatccttggcctatttttcctttggattacagtagtccctccttatctgtaggggatacgttccaagactccagtggatgcccgaaacttgatagtaccaaaccatttatatactatgttttatcttatacatgcactgtggccataacttttgcagtttgaggtatgacagcaaaactaactttttttccttcttcacaatttcactgatagaagattcattcttactgtaaatcttatcaacttcagcatgtgatttattttttatttttattttattttttttagtgaaagttgaggctgggcatggtggctgatgcctttaatctcagcactttggctctgggaggctggggcaggaggattgcttgagaccaggagttcaagaccagcctgagcaatatagtgagaccccatctctactaaaaataaaaatacactggctgggcatagtggcacatgcctatggtttccgttactatggaggatgaggtgggaggattgtttgtgcccaggagtctacggctgcagtgagccagggtcacgccactgtactccaccctaggcaacagattcagatcctgtctctaaaaataaaataaaacaataaaataaaagttaagaactttcacctttggcatatccaaatcatcagcatcgctactcttgtgctttggggccattattaagtataataagggttacttgaacacaagaactgcaatgctgggacagctgatctgatacgagtcagctgctaagtgactaatatgtggatgctgaacaaaaggatgattcacatcctaggtggaacaaaatgggaatatatgggatttcatcaggatagtcagaacgccttgtaatttttttttttttttttgagaccgagtctcactctgttgcccattctggagtgcagtagtgccatcgtggctcactgcaacctcagcttcccgggttcaaccgattcttgtacctcagcctcccaagtagctgagattacaggcttgtgccatcacacccaggtaatttttgtgtttttagtagagacggggtttcgccatattgcccaggctggtctcgaactcttgggctcaagtgatccacccgactcagcatcccaaaatgctgggattacaggcatgagccactgcgcctggccagaatgacttgtaatttaaaactgatgaattatttctggaatttttcacttaatatttttggaccaccattgaccatagataactgaaactgctgaaaatgaaaccatgagtaaggggaaactactctatttggttttttattgttgagtttaagagtcttttatgtattctagatacaacttcttttcggatacatgatttgcaaatattttctcccattctgggttgtcattttattttctcaatgatctcttttgaagaccaaaagttatttaaaattttgatgaaatgcaatttatctgttttttaaaattttgtccctgagctttcactgtcatatctaagaaggctctgactaatccaaagtcatgaagatttgcttttatacattttcttctaggagttttatagttttagctcttatatttaggtctgtgatccattcttagctaatttttgtgtatggtataaggaaggagtccaaattcatttttcttcatgtggatatccagtggtcccagcaccacttgttgaagactactcttttgctattgaatggtcttggcactcttgttgaaatatcagttgaccaaaatgtatgaatttatttctagactcttaattctattccattgatctttttgtctatccttatgtcaataccacacagtcttttttttttcccctacacgatctcgattactgcagatttgtagtaacttttgaaattgagaaggatgaatccaactttgttcctctttttaaagattgttttgactattctgattctcttgtaattccttatacattttaagattagcctgtcaatttctgcagaaaagccagctggaattttgatagtgattctgttgaatctgtaggttaatttaatgatattgacatcttaaaaatattaagtcttctggtccatgaacataggatgtctttccagttatgtatgtctttgaattctttcagtgttttgtaggtttcagaatacaagttttgcacttctttttctttaattaatagactttattttttagggcagtgttagctttgcagaaaaatggagtagaaagtacagagagttcccacatactccatccccacccctcaaccctgtacacagtttttcctattactaacatcatgcatgagtgtggtacatttgttataattgatgaaccaatattgatacattattattggttaaagttctttgtttacattaggattcactctaatgtgttttacagttctgtgtgttttaacaaatacataatattatctatccatcattacggtgtcattcagaattgtttcattgtcccagaaatcccctttgctccatttgttcatccctttctctctctccccaaatcccctgtaactattgatcttttcattgtctttatagttctgccctttccagaaaatcatgtagctggaatcatagtatatgtagccttttcaatctggctccttccacttaacaataaggttcctctgcatcttcttctgacacaatacctcatttatagtgctgaatgatattccattgtatagatgtgccacgatttgtttatccattcgcccacaggaggtcattttggtgacttacaagttttagcaattatgaataaggttgcggtagacattcatgtgcaggtttgtttgttttaaatagtcttgttctttcacctacgctggagtacagtagcatgatcctggctcactgcagtcctgactcctggactcaagtgatcctcccacctcatcctccctagtagctgggactacaggtgcatgccaccatggctggcttattattttttttttttaaagatggggtctcactgtgttgcccagcctggtcttgaactcctgggatcaagtgatcttcctgcgtcagcctcccagagcactgggattacaagcatgagtcaccacacccagccaggttttggtgcagacataagttttcaactcatttggctggattgtataataagactaattttagccttgtaggaaagtgccaagttatttttcaaagtagctatactgttttgcattcctaccacccatcaatgagagcttctattgttccacatccttggcagcattcagtgttgtcaatattttagattttaaccactctaataggtgtgcagcagtatcttattgttttaatttgcaattccttaatgacatctgggaagcatcttttcatatgcttactatcatctttttttttttttatatgcttattaccacttttttttttttttttttttttttcccttagagacagtgtctcactctgttgcccaggctgggctcaagcaatcctcctgccttatccatcctggtagttgggactataggtgcatgacaccatgcctggctaattttttttttgaagacagggtctcagccgggcgtggtggctcatgcttgtaatcccagtactttggaaggtgaggcaggtggatcatgaggtcaggagttcgccaacatggcaaaaccccatctctactaaaaatacaaaaattagctgggcgtggtggcaggtgcctgtaatcccagctactcgggaggcggaggcaggagaatcgcttgaacctgagaggcggaggttgcagtgaactgcgatcatgccattgcactccagcctgggtgacaagagcaagattctgtctaaaaaaaaaaaaaaaaacagggtctcactgtattgcccaggctggtcttgaactcctggcctcaagtgatcctcctgcctcagcctcccaaagtgctggaattacaggccactgtgtccaacttccatctatatgtcttctctcacttccttattttaaatttattgtgaagtattttactatttttgaagctatagtaaatagaattgttttcttaatttcattttcttttttccccttttttacatgctgccttgagatgtgatttaattttattttcagattgttcattgcaaatgggtaaaataggttgattttgtatactgatcttgtattctttgactttgatgaactcgtttgttatctaagaccatatcttctgcaaaaagagatagttttgcttcttcctttcccatctggactccttttctttgtttctcttgcctaatagccttgactagaacttctagtacagtgttgtatagaagtgacaagaatggacatccttgtcttgttcctgatcttagggggaaagcatctagccttttaccatgaagtatgatgttagtgtgggtttttcatagatgtcctctagcaggttgagcaagttggggaaactttttaagcatgtaaatgcttggaccctaccattacagtttttgattcactgagtctgggaaggaccggtatctttagttgtacaaaggtatataagaaaataaaaggtatataagttattctgatccacagggttgaaaatacctgctatatcatggttgaggtatcttatacttcattcttttaaaagctatgctgccactctgattcttccccctcagctgagcaccttggacttaatattattaggttcctaatgctatattcttaactctaattcttttggatactaaaccatgaaaaatggattgtattgcataggttaatttctttttatatactggttatgatgaggatatggtattaagatttgctttcacctataagtaatataagctacttgattatcccacttatggctaatttccttccttatcatagcagaggtggtactcagaacataattttattttccttttttttacatttcaataggttttggggaacaggtggtgtttggttacacaaataagttacttagcggttatttctgaaattttggtgcacccgtcacctgagcagtgtacactgtacccgatgtgtagtcttttaacccttactccccccatcctttcccccaaatccccaaagtccattgtatcatttttatggctttgtgtccttatagcttagctcccacttataagtgagaacatatgatgtttggttttccattcctcagttacgtcacttagaataatggtctccaattccatccaggttgcttcaaatgccatttttttgttcctttttgtggctgagtagtatttcatggtagatatataccacattttctttatccatgcattgattgatgggcatttgggctggttccatatttttgcagttgtgaattatgctgctaaaatatgcatgtgcaagtatctttttcatataatgacttcttttcctctgggtagatacccaggagtgggattgctggatcaaatggtggatctacttttagttccttaaggaatctccgtactgttttccatagtggttgtacgagtttacattccccccaacagtgtaaacgtgttcccgtttcaccacatccatgccagtgtctattattttttgatttctttattatggccattctcacaggagtaaggggttattgcgttgtggttttgatttgcatttccctgataattagtgatgctgaacattttttcatatgctcgttggccatttgtttatcttttgaaaattgtctattcatgtccttagcccactttttgataggattgtttgtttttttcttgctgatttgtttgagttcctggtagattctggatattagtcctttgtcggatgcatagatcgtgaagattttctcccactctgtgggttgtctgtttactctgctgattattccttttgctgtgcagaagctttttagtttagtttagccccatctaattatctttgtttttgttgcgtttgcttttgggttcttggtcatgaagtctttaccgaagccaatgtctaggagggtttttccagtgttatcgtctagaatttttatggtttcagatcttagatttaattaagtctttgatccaccttgagttgattttttgtataaggtgagagaggaggatctagtttcattctcctacttgtgacttgccaattatcccagcaccatttgttgaatagagtatctttccccactttacgcttttgtttgctttgtcaaagatcagttgactgtgagtatttggctttatttctgggctctctattctgttccattgatctatatgcctgtttttataccagtattatgctgttttggtgactatggccttacagcatagtttgaagtcaggtaatgtaaggcctccagatttgcagaacataattattgatggcccttgtaaattatttttagcttcttttatcaatcttattgattttttttattttgacccatatgaataatagtaattttgcttctttaggacaccatgtaaaattgaacctagtataaaccacatcctaagcaccagaaagcctggaaaggaagaaggagatcctctacaaagggttcagagccatcagcaagcgtctgaggagaagaaagagaagatgatgtattgtaaggagaagatttatgcaggagtaggggaattctcctttgaagaaattcgggctgaagttttccggaagaaattaaaagagcaaagggaaggtgtgtgtaattcaagtttgtgaagaggacttaacttagttgtgtgaaggttgagctgacctattaagtctgaagaaaactaaccttatagtttgtacctttgtatgatgtttctatggtagtactgtttctttctgtgtatcagccaaaatcccactgctgccttctatggttgtactgtttctgtgtatcagccaaactcccattgctgccttccatgaaaactccttggggtgtgggggcactgagtatgtttagaagtaaaggaagaagttctgaactgtatgaacaatttatattccccaatacaataagcaagcagctatgatccctgacatgcatatatgtacattccatgcatccctattaagtacttttcctaatgttattgcttgaaatatttcactttacctttgatactttgtctgaaatttctccaagggcttatttagattaacatagtaggtcatactgcagtgatttagattatagatattcgtattgttttttaaagacattatatttctaaattaaaggaaaaggtttaaaaattgagatatggggaatttttgggaaacaggaagcagttctgattctggagcctggagtacttgaaggcaagaggtagggcagaatgggctggaaagtagggaagtaaggcatatggggcttaaggcatgagaaggtgaaggagaataaagaagggtacagaaaatgaggtaggggagggtccacttccatttagacattttttattaggatctgtaaggagaaagtaatgtttcttttatacatccgtatccagaataacctactaatatagctcagctctcttaacaggatgtggtgtttgtggggttagctgggaaacttaaccatcacttatactttgaggagcaatcttttctgagttccaggtgacaacctggaagcaaactttggtaaagcagactgttagtaagtttgaaattgccttcatttgttacactaattagtgtcatccaagattgtcaaaagtgctctgggttcaaatggaacttgtgtgtctaggtagaagagagggatggttgcaaagcaaggtgttgagtaaggcttttaaaaaaggagaaccactccagcaaagaaataggctaggagggtggccaaatatgaaccagaaaaggaactaggtatctagataaaaactgtttcctaagggaaaagcttagtctgtaccagatatatagaaggaaaatgaaagtccattttagggccaggcacagtggctcacacctgtaatcccagcactttgggaaaaaaagaccagcctgggcaacatggtgaattctcatctctgtgggaaaaagaaaaggtacattttgttttcaactagccaaagaaggacctactctagattacatgggatttaattaggaataagaaggcattgacctctgagaattttttaatactcatttctattgtgttttttttttttttaaatagagagatgggatctccctgtgttgcccaggctggtctcaaactcctgggctcaagctatccttcccaccttggcctttcaaagtgctgggattataggcatgagccaccatgcagaccttaatgcttatttctaagctggtctctgaatctatttcatgaacttgtataaattcccatctgtgtataagtttgtacccttacataaatcctcatttcaataaatgtggtttctagttactgtcaaaaactgacttcaaagacttgccaactacttactctcagggaaaaatacaagaaaagaggaagccacaatcagggcctacacaaaggttgttttttctttgcgttgcacttccaaatcattttttccctcttctttcaaaaactttagcttctttcagatttctgtcctctaattcttttctatctcctgagcctccttagtgtactcacctcagacttttcagtcacactccatcattcattaattgactaataagcacatggcttactatctatgcctctttaccctaacctgcaaaaccctgcatggccaagcatggtagcatgtgcctgtagtcccagctactcaggagagtgaggcagaaggattgagcccacaagtttgagaccagcctgggcaatatagcaagaccccatctccaaaaacaaacaaaactccatgtggcttagcctttacctacctctccaaccccatctttttctattcaccctcttactatgctgcaactacactggacttcctttggattcttagacacagtggtcttttcctgcattggggcctttgtgccacctagtttgttagcctagaatctttccccagaactttggccccttatcatttaaattacagcttaatactgtcactttatcagaatgatcttccctgatcactggtcttaagtagccctcccttggcctccatctccctacccagtcaaacattctcacgtcacctattttattctttttcctaaactgattttcttgtgtgtgtgttgcccccaaatttgaatgttagtatcacataaccaaggactttgtattatgtaccactgaaacctaagtactcagagctgtgcttggcacatagtaggtattcaatgtttttttccttttagtagaaacctgtgttgttcaaaggtattctatttttttattgaatggataaagaatagaggcctagaccacaagttgaggaccttattccacttaaatcattttcatctgtattagtaacatatatgttgaggagatgagctccaaaggcagtttttgacagaatgagttactatgaggaataatacctcaagcaactttactgtttctagccgagctattgaccagtgcagagaagagagcagaaatgcagaaacagattgaagagatggagaagaagctaaaagaaatccaaactactcagcaagaaagaacaggtgatcaggtaatttttcttttttcatacacaaaactagaatttattgaaacaaatttaaacattataaaaatatagaaggttaaagtcctcccaacccccatttagagtttctggtagtttcttagctgttagtagccggaaagttgagcgggaaagtaatttaacaggtgacttcaaatggaatttgtggcatgtgaaataagtggtgcagtttattgacttcttagttatactccaaatcattatgttattaattctggcttaagctttttattctagctatgttccattaaaatgggattgcctaaagaaatttagtatatgcctggcactgctcagttgagtacaacagtactggtttagagtaggaataaaaattattggaaatgacttttgtggtacactcattttgtactgttagtggatgtctagggaaagagtacagtaaagctaatgttagaactagaaaatagcattttctggatgggagggacattgattttgtttatttaatgcaaacagcaagaagagacgatgcctacaaaggagacaactaaactgcaaattgcttccgagtctcagaaaataccaggaatgactctatccagttctgtttgtcaagtaaactgttgtgccaggtaagactacataggtggaagggacaatgcatataggagggcatttagaaccaacctttgactctctagtgccttgaagtctccttgacgtttacagtatcgagacatggtttttgtaagtctctgtcacaacataagctttgatgctgatgagggaggacagagcattgactattttccactgaagaaacatgtttcttatagaaacaaatacatatactgtttttaaaaaacaaaatcacccatttctaccactaagagatgattaccattaacactgttctgtctcttcttttgtgttgtatttttgttttgttttataaaaatggcagcttaccattttgtaatctgcttatactattaatgcaacttgacatctattatcaaatatatttctgcaacatttttgataaccaaagcttccatcttctttaagagaatttgaattgacagtaataatttatcttagagtaaatattatatttaatggaaaagcctcttggacttttaaaaattaaacagttctttctgtgggtattgagcacatgatttaaaacaagtttctttacagagaaacttcacttgcggagaacatttggcaggaacaacctcattctaaaggtgagttgtatttgacagccttgagaagaacttgctgataacaaatgtattatgtaataaatggtaaatatttttaattatgataaagggattgaaagacagggggactaggatactaggaatttagtataagcatatgctttatgataggaaagacatttgaaagagtatttttttaaagattcctcagtgcttcaaaatatttggtttaattgtaattttaaatttacactaaccaccaaatcttatactttagttactgtacactaaacagcaaagacactaagggaagtgtttcttttcagggaaaaaaaaatttaaagctattttatactcaaattggttttcttttcttcaaaatgtgttaaaagtggtgaaacatgaatatctacttgtaaatggtttggcaaaaataaaaataaaaaacattaaaatctaattaaacctctgtttctaaccgtcaatttattggaaatataaagcatggaggaacgttgttaaacaacacagcgggatggaattggcaaaatccagcattatggggctagcaacccagtttgttcaacaaaaattccccccaaaactctatagaataaaagagatttaagaggcatttgaacagtcacagtatacggatcttaactctgcattcccaattcaaacaaactttaaaaaaatttttttttatttattaatatttttttgagactgagtctcgctctgtcgcccaggctggagtgcggtggcgcgatctcagctcactacaagctctgcctcctgggttcatgccattctcttgcctcagcctcccgactagctgggactacaggcgcccaccaccacgcccggctaatttttttttgtatttttagtagagacggggtttcatcatgttagccaggatggtctcgatctcctgacctcgtgatccgcccaccatggcctcccaaagtgctgggattacaggtgtgagccaccacacccggccaaaacatttttttaattggtaaaatatgaaacttctcactggacatttgatattatatatatattcataaattgttcattttataggtaggtatcatgttttgggattgggatttttaaaaagcctcttttagaaatatatactgaaatatttgcagataaaatgacatgtctggaatttgctttaaaataatcctgttgggttgggtttggggagtagtgacagtggtagagaatctaaatggaacaagatcatctaagtttaggtaattggtaaattgtttaatgaccttttatatgtttgaagctttttgttattaaaaaaacaggttgccttcctgctttcaaacaacacaaaatattgattaatttatctggttgtcttgaagagtaaagcatttactcctagagtatgtatctagtctctctttctctaggtcccagtgtacctttctccatttttgatgagtttcttctttcagaaaagaagaataaaaggtacgttgtttttttgtttttttggtttttttttacttaagaattttctgttattataagtgaggataaattaggggttactgttatgaaaaaaattgctaagtgaggtatgtctttttccagtcctcctgcagatcccccacgagttttagctcaacgaagaccccttgcagttctcaaaacctcagaaagcatcacctcaaatgaagatgtgtctccagatgtttgtgtaaggagcagtatccttaagttaatgtaaatgggctagtggattgtttattcaaaaccacaaaagcttaaggttaaaattgaaaccactgacttgaattaagcacatgaaaagatgctcagcattactactcaacagggaaatgcaaatcaaaaccacagtgagatactactttatatcctctaggatagctataataaaaaattacgcacagtaacaagtgttggcaaaattgtggagaaattagaacatacattactggtgggaatgtaaaatggtgtagccactttggaaaacagtttggcagctctttaaaatgttaaacacagttaccatatgatcctgcagatctctgcccaggtatatactcaaaataattgaaaacacatgttcatacaaaaaatttgtacacaaatgttcatagccgtattactcatgatagtggaaacaaccccaaatgtccatcaactgatgaatggataaacaaaatgttatgtatccataccatgaaatattatttggcaacaaaaaggaatgaagtactaatacctgtcacaacatagatgaaccttgaaaacgttatgtcaagtgaatgaagccagatacaaagaccacatactatatgatctaattttcatgaaatatccagaataggcaaaagtgtcatggattgaggttttccaggggattagagggtggtggagagtgactgctaatgggtatagggtttctttttggagtgatgaaagtattctggaattagatagtgatgatggttgtacaaccttgtgaatttactaaaaaccactgaaatatactttaaaagggtcaattttatggtatatgaattatatctcaatttttataagtagggaaaaatcactaattttaaagccttttgtacttttaattttttaaccaacatagcaaaagacatttgttcttttttatataaaataccttttttggcaatgcaaaagttatgtgggccaatcatttttcttcagtaatgttctatattaaccgctatagactaatgacataatacttaaggtaaaaagaccctgtgtagacatttaagtcaaaataaataacctgtatcattggcattttattaaagttttaaggaggaaaaatcattctcttcaaaccagcctctggaagcttgtcatgagactgaaaagaattgagtatgtttaatctgaagacttttaaggggtgatgtgagcagtagctttagtaacttaaagcagtgttttccacatcctagggaatcatttggaggaagttttttaaaagcactttttcattttagtttcttctctgttgatgtatattttatatccagtaaactgcacaaatattgtacagctagatgaatttttccatgcaattttttcccatatcaagatacagaatatttccatcaactcagaagagactagcgagtcttttgtgactaacagtgcttaagccccattccatctaggtgccattggaatttccagggaagaagtccaagcatgtatttttgtctttttaaaaatactttctcagataattctgctacagttagtctactgactgctatgaaaagacagtgatgtaagagtaattaattacatattgtgttctggagtaaaccaccagagaacatgatgaacaggctagatttggatacagtggttctagattcagctgttcaaggatatgcttaattgttaaaggagtccaacttcatttacctttttttttttttaaccagtcttttacttgaattttgttaataagtacctaccagaattttcatcccctaaaaaaatcatatttaaaatgtctaagctaatatggccataagtagtatttgcataaaatgtatagattataaacatctattttactttaatcacatatataaatacatatatatgtatatatatatttttttctttttcttttttagacagggcctcgctctgtcacccaggctggagtacagtggcatgatctcagctcactgcagcctctgcctcctgtactcaagcattcctcccacctcagcctcccaattagctgggactacaggtgtgagccaccatgcctggctaattttttattttttggagagacagggttttgccatgttgcccaagctggtctcaaactcctgtgctcaagtgatcttcccacctcagcctgcctcccaaagtgttgggattacaggtgtgagcaaatgtacctggccaaatcttttttttttttttttttttgagactgagtttcactcttgcactcaggctggagtgaagtggcgtgatctcggctcactgcagcctccgcctcctgggttcaagcaattctcctgcctcagcctcccgagtagctgggattacaggcgcccaccaccacgcccagctaatttttgtatttttagtagggacggggttttgccatgttggccaggctggtctcgagcgcctgacctcaggtgatccacccaactcagcgtcccaaagtgctgggattacaggcgtgagccactgcacccggcctataattttttttttaactatactttgtttcttccagatgtacctcccacctttagttactaagtcagaaattcaaagtatgtgtcaaattggtaatgatctagaaaattaatctctggtatccatatgggttaaatcaaataggcactatttgtatactacaggtaaatatgtaaagtggtataatctctctgaggacagctaagtaatatagataaagaactttagtgtttataaccttttgaccttacaattctacttttaggaattaatcctaagaaaattaaaggatttataaagatttatgtataaggataaagtagttttaaactagtaaaaaacagaataacctgaaagttggttaatttcttatagacccacaatgtggccattatgtttttaaagaatttttaatagcataggaaggaagaaatacaaaaagtatgagaaagagcaatacagagtatcatgaatgctacagtttcactggttgtaaaactgcttttcaaatgcatagaatatgctatgcatatatcctaccagacatacatgaattgtctttaagaaataaataaaaattaggtatgtagcatagaggaagaagacctaaaaactaggaggatagcaaatcattagaatatttactaagtgaaagcagaagaaaaatagtatttgtgctttagttcataggtgaaatttgttgaggaacaaaaccattgcccaatatttttctttgtatggagaatcttcctggtacattttttggatgaagtatagtttactgtgttcatgatataaaaacctttttatatttgcctagatattctgatatgctatttctgtaccctgtgtcactgagctaatatgtctctctcagtaaaaaagttcttcatgtattgaaatattttagctaaactttatatggtctttatttcaggatgaatttacaggaattgaacccttgagcgaggatgccattatcacaggcttcagaaatgtaacaatttgtcctaacccagaagacacttgtgactttgccagagcagctcgttttgtatccactccttttcatgagataatgtccttgaaggatctcccttctgatcctgagagactgttaccggaagaagatctagatgtaaagacctctgaggaccagcagacagcttgtggcactatctacagtcagactctcagcatcaagaagctgaggtgattggggatttacaggttttacaaaccagattgtttactctcttattctgcatgtgcttgtcagttacagtaatcagttatcaagttcttactaactgccaggtactgtgctaagtgctttacatgagagtagggctgccccagatgaagtgtcaatgggatttagtgattgatttggatgtgagggttaaaagtaaattttgatggtagagaaactaagtggtccgagaggagtatagtaccattgaggaaactttgcaaagtgtacatgactgacgaaaaggaggcatttagtttttctttaatattgagtttaaaatagtggtaggatagcttttgttaattttatgtatttatttatttattgaaatggagtctcactctgtcgcccaggctggagtgcagtggcactatcttagctcactgaaacctccgtctcccgggttcaagcgattctcctgcctcagcctcccaagtagctgggactacaggtgcgcaccatcatgcctggcttatttttatatttttagtagagacggggtttcgccatgttggccaggctggtctcaaactcctgacctcaggtgatccacccgcctcggcctctcaaagtgctgggattacaggagtgagccactgtgcctggccagcttatgtgaattttaaataggcaactagagatgtgttttttaaaaaactatcttttgatagagaggtggaaatgaactatggaatagatatgagggaatggcttatggccagggtctgacacttgttttaggtcagctaatttaactaattccagttttaggaattctttgtaattggcaaatttttgcttttaaagctacattttgagaggccagatgcagtggctcacctctgtaatcctggcactttgggaggctgagggaggcggatcatttcaggccaggagttgaagaccagcctggtcaacatggctgtactcaaaaaaacttttttttgaaactttttccctacaggcttttaagcacatttgctagcatgtattcacattgcatgatttgggtttctcttttctttgcctaaccttttcttcttgaagaaaaaaaagtccagagaaaggataaagaggaagaaagtgtcaatgttagtgtttctcaatattatggaatatagagtagatatttactataggtaaataaagcataaatccagaaatgtatgctggacatggcttattcaccaggtttagaggaggttacctagattctgatttggggaaataatggacttgaaaaatgagactattgctgagtgcattggctcttgcctgtaatcccagcactttgggaggctaaggtgggaggatcacttgaggccaggagtttaagaccagcctgggcaacaaagtgatgccttgtgtctaataaaaataaaaaaaaaaaatagctaggcatggtagcactcacccagctatcatttcctgggctcaagtgattctcccacctcagcctcccaagtagtcccagatattagcttttttgttttacaacctttcagctacttgggaggctgaggtgggaggatcacttgagcccaggaaatcaaggctgcagtgagccatgatcgcaccactgccctccagcctgggtgacggaatgagatcctgtctcaaaaataaaatgaaaagtaaaaaaaaaaaatgaggctatcaaataaattgataacaaattataaattatttaaacctaaattttattgtgttaaaaaataaaagaataacataaaattataaaatgtgtacattaaggccaggtgcagtggctcacgcctataatcccagcactttaggaggctgagacgggtggaccatctgaagtcaggagttcaagaccagtctggctaacatggtgaaaccctgtctctactaaaaatacaaaaatcagctgggcatggtggcaggtgcctgtaatcccagctactcaggaggctgagacaggagaatcacttgaacccgggaggcagaggttgcagtgagccaagatcatgcagttgtgctccagcctgggtgacaagagcaaaactccatctcaaaaaaaagaaaaatgtatacattaagaatttatgaaattataacaaagttgatatatattattcctataagaattaacttatttttgattcttttagcccaattattgaagacagtcgtgaagccacacactcctctggcttctctggttcttctgcctcggttgcaagcacctcctccatcaaatgtcttcaaattcctgagaaactagaacttactaatgagacttcaggtaggatatacataccactatatccatgcctagtgaacacttgtttatctcagcaaactgagctgtatgtttttctttttttgagacagggtctcactctgtcacccaggatggagtgcagtggcacaatcaaactcactgggctcaggtgatcctcctacctcagcctcccgagtagctgggaccacaactgtgccaccaccaatttttgtattttttgtagaggtggggtttcgccatgttgcccaggctggtctcaaactcctggcctcaaaggatcctcccgcctcagcctcccactccctgggattataggtgtgagccaccatgcccagtctatgtgtttttccttcttaaagaagttgccggccgggtgcggtggctcacgcctgtaatcccagcactttgggaggccgaggcgggtggatcacgagggtcaggagatcgagaccatcctggctaacatggggaaaccccaactctactaaaaatacaaaaaaattagccgggcatggtggcgggtgtctgtagtcccagctactctggaggctgaggcaggagaatggcgtgaacccgggaggcggagcttgcagcagtgagccgagatggcgccactgcactccagcctgggcaacagagcgagactccgtctcaaagaagttgccataaattgtgaaatttctagagtagattagtacgaagtgaacacagtttcataaacacctgagacaggtgagtgtagttaaattaacagtgctgactgtgtaatcttgattttttttttcttctactctgttataatatccattttaagcattagggtttttttggtgatatattttcacctttccctcccactggcagaaaaccctactcagtcaccatggtgttcacagtatcgcagacagctactgaagtccctaccagagttaagtgcctctgcagagttgtgtatagaagacagaccaatgcctaagttggaaattgagaaggaaattgaattaggtaagtaccattgaactcatgtcctctggttcatgacagtatacaaataagtgattatttgtacttaagcttgatgcttgagcactgtaaatattcctagattgtattttttaaaaaagcaatatagaggatgacacatcagtaacttcatgtcctaataataggaattatgtcttctcctcttgcaatctttaacaaattatttttaaaagtattctagatactactaactggcaaatacaccagtgcctctatcccttaaaccaggaggtaaaagctacagggctgtatatgttcacagtgatttttaaatggaatcaaactttctcaacaggtaatgaggattactgcattaaacgagaatacctaatatgtgaagattacaagttattctgggtggcgccaagaaactctgcagaattaacagtaataaaggtgggactgattctttataatttcagttactttgtaaataatacggattggagcaataactgtcctcatgttaccatcaaatctttctaataatctctttcaatatgtccaaatatattaagtatcctttcagtttcattttttttaggaaatctctgctgatactttctggcctgctccaatctggacaagttatacattagctttcacacaatcaccacacacaatcaccttggaatttccatttattatcatcctaggtattcacattacctttgtcttatattggatacctagtttctttttatctttgttttttaaaggacacggtctctgtcatccaggctggagtacagtagcatgatcacggctcactgcagcctcaacctcttgagctcaagcaatcctcccacctcagcctctggaatagctgggaccgtaggtgcacgccaccactcccagctaattattttttgtagagacgggggcctctctgtgttgcctaggctggtcttgaattcatggctcaagcagtcctcccaccttggcctcccaaagaactggattacaggcatctaactttgcttttgaatttttttgccattctgagtctcaaagctttgtgtgaagttatttttccttctttctggatccttataggatcttattcttgtccccactattctgaaatgtcacaattacatgccttttcataagtttgttgtcacttatgtgctaggtactcaatggccatttcaatctgttaattccctcagttctgagaaattttcttcaatgggaaaattatttttcccctcagttttctctgttctcttattctctaattccttttattagaggtgtatatggcatctttggacagaacctctaaaaatttaactttttttctcctatattctctctttgtctttttactttactttctgagtatattatcagcttaatatttttggtctttttactaggtttttatttctatatttaattttcaagagctctttttaaaattttttacccctttgtcatctgtttcttcttgttttcttttttgtctgttttgatctctctcacactacaggctttcttcaagtctttggctctctattcgtatttaagtatgggacattgaaagctctgtgtatatggaaagaccttgacagctgtggacctcaatgtaggatgatctagtttggccattttattggaaaaccctccaatctttagatcctttctcttgacctgatcatagaagtcttctccctcagagaagacttctaattttctgcctggagcatataagcctggctgctagctttctgaaatctgagtgaggaaattggtctgaagaatagaagagcagggaggtgcatcttaactgctgcatatataacatctgatatatatactttttcctgttttctatgttatttctacccccctcagtggtgcctagtgccctctagtccagagcccttctgttttatactcactaggtaataaacttctggacttcgagaataggggagaggtagttgctgggctgggctatgggagcagaggagggaagctggggtctaccttcctgtttttttgtttttttttttcttcgagacggagttttgctcttgtcaccctggctggagtgcaatggcatgattttggctcactgcaacctctgcctcccagggtcaagcgattctcctgtctcagcctcccgcgtagctgggattacaggcacccgccaccaaaagcctagctaattttttgtatttttagcagagacggggtttcaccccttcataatcattggtcaggctggtcttgaacccctgatgtcaggtaatccacacgcctcagcctcccagagtgctgggattacaggcatgagccactgcactaggcctaccttcctcttaaatgggattcaatcactcctgtcttagctccaccctcagcctcacttccatgggtaattggtgctgccagttatatagtataggaaaatagccttgtagtgtaaatgtagctcagctttctcctctgccaaaatcagtttttattctaattggattgttacctcctgttctctttccagcttatcctctttccagaatttgttgttattgtgtcttttatagtagatttatgcctttaaaaatatctctttattatttctctatcagaagggctggaaggaatgtgtttcaacctgccagccataaccatagacttaactgaacttatttttaaaatacaatgtcttacaggtatcttctcaacctgtcccatgggacttttatatcaacctcaagttaaaggaacgtttaaatgaagattttgatcatttttgcagctgttatcaatatcaagatggctgtattgtttggcaccaatatataaactgcttcacccttcaggtctgtaatactaaaaacataatttaaagtcctgaagtagagagatttgtgctccatttagcaaaggaatttagtacaaaattcctgtcaatcttctagaaatagaccaattcaagtataagttagaagcattgataattttctcgttattttgaccaaagatctctttggtatttttttaactttttttggtccgttgtcaagcataaataaaagtagaattgtacaatgaactcccatgaactagtcatctatgataatcttagctcatggtcactcttgttttagctatactacccccactggatagtttttaaaacccagacacaatatgtcattttactcttcggtttgttcttaagaaggtttgctatggattttgatgataatatgaattctcaaaaatggttggaatgagggtattttaaatccatttattaagtacctattttgggccaggctcatgcttgatgcccttcatcattatgtcattaaatccttacaaacaatcttatgggagatggcagtgttattaaaactgggacatagactcagtctacagaggtgcctacgttccagtagagaacaaggaagactacaaaccatcagttttcaaggtattgagtataactacgatctgccaaacttgagaaatagtgagttttctgtccttcaatttccaggatcttctccaacacagtgaatatattacccatgaaataacagtgttgattatttataaccttttgacaatagtggagatgctacacaaagcagaaatagtccatggtgacttgagtccaaggtgtctgattctcagaaacaggttggtccttttcattcttataattctgccagctgtctcttaaaacatggatagttgccacttttttttttcttttttgaggcgagggtctcactctgtcacctaggttggagtacagtggcatgatcttggctcactgcagcctccatctcccaggttcaaacgattctcccatcttaaccttgctagtagctgggaccacaggcgcgcaccaccacacctggctaattttttgtattttttggtagagatgaggtttcaccatgttgcccaggctggtctcaaactcctggcctcaagtgatctgcccacctcagcctcccaaagtgctgggattataggcgtgagccactgcacccggccaagttgccaatttttaaagccttttgataaatgccatatcgaggaacatattatgttaagagagtatttacctaaaagtcaaaaatcattaagaatagtttaaaataattcaaagaaataaacacattgaggaaatagattaaatcagataaaagaattaatcactgagtattgtgatgatatatgtcaagatgagatataaaatatgaatattttgaggaatataaagtggattgtttagtcattctttgagtgggaccagtgccactctagcgaggatgccagcaaaatcaaggcactactcagtttcatagaccaaagcttaagtcaggcctaactgacctgttagccaagagaagtgggtaaaaccagagttcaaatacaaactatgccaaggaatggggtttagtgttcaaattaaacccagtgtgtccatcaggttcaaggggtgagcacagagcaggaaataataaatgaatactaaggactgagaaaatatagatcacgttcaggcattaactaggcaaaaacagtccaacatttttgctttgtgaaaagtactagaggactactatattcttttagtgatcattggtgttatagtatttgagtaaaagcagcctggtttaaagatgctgtgtctgcccaaccctgtgtcttgggtgaggtgttaactttgtttctgaggccactggtatacactaatagctggacttactctttacatttcttctgaatacttaatctatcagaagagattgaattagactctaaattatagttaacgtggaaattaaaagaaccctcaatgtgttcctgtgattgtaaccaaaagaaccagagaatcccaccttctcccctgagatagcagagtcaaaggctttcccagacataatgtagcagcatttctcatccagggcaccataggtattttgggtgagacaattctttgtgcaggtgtgttccaagcaatgcaggatgttttatattcctattcccccccacccacccaattaagtgcaagtaacaatcccctaagccgttgtgaccaccaaaaatccccccaaatttccaagtatgagaacccctggtatattttcactctacttaacattaaaatgacagtgctgaaattcccagggctatggaaattggaagcagaggttttttctaagccttttagaattggccatttgtggtctaatgaagtacgataacccttctctcagccactagaggctctaggaaagtccatagtattaaagaggcattgctttttactttgtcactgcttatcaaatttaatcagaaatttcacatagattcataaggaattaaaagccagaaaggggccgagcacagtggctcatgcctataatcaatcccagcacttttggaggctgaggcgggcagatcacctgaggttgggagttcaagaccagcctgaccaacatggagaaaccccatcctactaaaaatacaaaattagccaggtatggtggtgcatgcctgtaatcccagctacttgggaggctgaggaaggagaattgcttgaactcaggaggcagaggttgtggtgaactgagatcgcaccattgtactccagtctgggcaacaagagcaaaattctgtctcaaaaaaaaagccagaggccgggcgcagtagctcacgcctgtaatcccagcattttgggaggccgaggcgggcggatcacgaggtcaggagatcaagaccatcctggctaacacagtgaaaccctgtctctactaaaaatacaacaagatagccagccgtggtggcaggtgcctgtagtcccagctactcaggaggctgaggcaggagaatggcgtgaacccgggaggcagagcttgcagtgagccaagatcatgccactgcactccagcctgggtgacagagcgagactccatctcaaaacaaaacaacaacaaaagccagaaagggctggatgcagtggttcacatctgcaatcccagcactttgggaggcagaggcaggaggatctcttgaggccaggagttcaagaccagcctggtcaacatagcaagaccctgtctctacaaaaataaaataaaagccagaaagaaccttttgaaattgcttagtttagttgcttactttagtttctgcatattttttgtgaggaaaatgagatccaaaaaaatggaatgtcctacccaaagtaacagtgagtgagtagctgattagagggctaggacaccttcatgcatgcttctttttattaatctatgagacattttttccctatgcctccaaagttatataaatattttacaattacactgggcatggtgactcacatctgtaatcccagcactttgggagaccaaggcagaggatcacttgagcctaggagttcaagaccagtctgggcaatataatgagacctcatctctacaaaaaattaagaaattagccaggcatggtggcacacaccagtagtcccagctactcgggaggctgagatgggaggatcgcttgaacctaggaggcagagactgcactgagctgagatcgcaccactgtactccagcctcagtgacaagagtgtagaccttgtctaagaaaccaaacaaaacacacacatgcacacactttacatatatatataaaatacatatgtatattttatatatatcagaatccacgatccctataactatatatatactatatatatatatatatatatatatttttttttttttttaattatagtatagttttatggtggccaaaaaaggttggctcttgtgccaaggaaaaatgagagcaattatcaattttaaagtaaaatacatagatcattctgtgccgtggaggtatgtaattggagtagttaaagactgtatttaggaatattgcaccaatatcaggagtttgagggaattaattgagaaaaacagacaaaaggaacacatgaaaacccactcttttcatttataaacagttcctatgtccccttggagaatagcattattgcataggatagataaacccaaggaaaacaaaattaattgataattaattagtattataaagatttttttagtaaataactggaattacaagtaagagtaagataaaatatggtgttttacaagaaattttacaatacagataggactttataaaacagacttgcattgttttccattaaactctggaaggaagaatctaaacaatacttggaaagcctatctggaatagtaaacaagaaaggctatgacacctataaaattttaatttcctccatcataattcctgtcagtgtataaatcattgcaattgtatgtgttaatgtgtacagtacagggaagaagcctgtgctctgcttccatacttactttatataatatggaagcttgataaatgtttaatggtggccatgcaccgtgattgaaatatactttgtgtcaccaaagtggtgacattccttccgcattgggtggacactgccactgctctgtcttacaggtgcattttcaaaattaaccactggagggagttgttggcatagctaagatgtacccaaggtaccttttttttttaaagaccagctatgcagcttctttcatggcctatttttattatctccttctcttaaatctgggctcagaatccacgatccctatgattgtaacaagaacaatcaagctttgaagatagtggacttttcctacagtgttgaccttagggtgcagctggatgtttttaccctcagcggctttcggactgtacagatcctggaaggacaaaagatcctggctaactgttcttctccctaccaggtaagtgtaaaacaagcctgagcaaatatggagagggtttcttaatctctttattatctagataagctataaaagctactgtttactgataccgactcctagaatagatgacctagttttcaaatatcaccaagtcaagtaaaatgtaacatttttgtgttacagcattgaagaatatacacatacatgtgcaaacacatgactaactctgtaaccgagtgccagggccactcctactgcctaccacccatgtaatcttttataagtcattttctgtgatcttctctgtaaaatagggataacagtctctgctatgtgtttatcagaattgttatgaggagtaaatgaagtaatgtatataaaaagaacattagcacaaatgtaaagtcttttgtatggtggcattatatgcagaaattccttctaactcagctttagacataagacatttgctgattgaatatgtagcacaaacctgaactaatcatgtggaccccatttagatcacagctggagttcatgcaaactcagtaggtctacaaatttgaatgtgatagtccaaatatttcatcttttgttcttaaggataattcctagaattggctctattgatcacttctttggagagcttctccctttactgtaagggtgaggaacagtctactaaaatgtatgtcataaaataaacttagttaagcactgtaatacctttcaacttcctaccgaaataagctgccatggtagaggcagagaattattttagctgatggtgctttttgtgatttcaggtagacctgtttggtatagcagatttagcacatttactattgttcaaggaacacctacaggtcttctgggatgggtccttctggaaacttagccaaaatatttctgagtaagtattgatgaatgtcagggtctctgcctgtcccaataattttctgtttctcttgggtgctatctctgctttggcagccttagttttttaatccaaatgccatggttccagtagtttcagccagttttcattagagtatcagcagagcagctagtgcaggaaaaaggaactgcttactaaaaataagattcaaaactattcagacttcaggacatcattctgaatctagctgtatcttccagactacagctatagtatggaagcttccctgtttagatatgtgaaaagaagcatttcatgagaataattttctaactaattggtgttagccttaaattcctttttctttatttatttattttttgagacggagtctcgctctgttgcccaggctggagtgcagtggcatgatctcggctcactgcaacctctgcctcccaggttcaagtgattctcctgcttcagcctcctgagtagctgggattacaggcgtgcgccaccatgcctggctcatttttgtatttttagtagagatgcggtttcactacgttggccaggctgatctcgaactcctgaccttgtgatccgcccgcctcggcctcccaaagtgctaggattacaggtgtgagccaccgtgtctggcctaaattcctttttaatagcaattattaccaaaagttaataagcatcctttgaaaagacttacatttctaaactatatgctaattttaggctattttttatttaataagtggatagaaccaaaccagataactgactctcctggagaagaagtaagtggtctcttaataagcactgcttggtctcagaaccttagtactccctcaagcctgctcataaaacttactaagtcagccgggcatggtggctcacacctgtaatcacagcactttgggaggccgaggcagattacctgaggtcaggagtttgagagcagcctgggcaacatggcgaaaccttgtctctactcaaaatacaagaaaattagctgggtgtggtggcacatgcctgtaatcctagctacttgggaagctgaggcacgggaatcacttgaacctgggaggcagaggttgcagtgagctgagatcgcgccactgcactccacccagggcaacagagtgagactccgtctcaaaaaaaactaagtatctacgttccactttagcttatcttagcaaataagttcccagcctgtcacctattgttatattctttggttaaaaaaaaaaatgagtgttgaagatttaatgccccttctctattttcatctttgaataattgaattgtacttttctcttcatttaattcagaacttggccagtgttgtctcttacatgaacttttaaaaataggcttgaaatacaatgtaagacatataggatggatataggcatgtccacttggctatggtccaggcaggtctggctaacacaagcagaaacaagtggggtcagttggggtttcctaacagccctgccttatctaataagggaagtttctctgatcaaaagaaaataataagaagcaaaggtacaaacatattaagcagtagttagtttagtcaagcttacgattatcagagaattgtaaagaagatccactactggggtaggagaaaggagctgtagcctttttaatgacctagactctaggaaagttagaggaaataaaattcctttttcttctatttgtagaagaaaagtgctatgtcttagtacacagaggaaatttatagatttagatgagagatcttctttccctttatgtgcattgtatcttggcttttcccactatggtagcccttttttgtagttcttccctgggctttcaaaggactatttgaatgatctctaaccctagagttctaggtattaccttacaccattttggtgcataaatgtaccactgagttaaactaaaaggaattataattttcatatgcctaatcttgatggaaatggttttatatatttttaggctaaaagatggtgaattgtggaataaattctttgtgcggattctgaatgccaatgatgaggccacagtgtctgttcttggggagcttgcagcagaaatgaatggggtttttgacactacattccaaagtcacctgaacaaagccttatggaaggtagggaagttaactagtcctggggctttgctctttcagtgagctaggcaatcaagtctcacagattgctgcctcagagcaatggttgtattgtggaacactgaaactgtatgtgctgtaatttaatttaggacacatttagatgcactaccattgctgttctactttttggtacaggtatattttgacgtcactgatattttttatacagtgatatacttactcatggccttgtctaacttttgtgaagaactattttattctaaacagactcattacaaatggttaccttgttatttaacccatttgtctctacttttccctgtacttttcccatttgtaatttgtaaaatgttctcttatgatcaccatgtattttgtaaataataaaatagtatctgttaaatttgtgcttctaacatgtcatgtagtttttgcaaactaaaataacagatggcttaactttgcagagatgaactattttgccatggaaatttatatatcctagacttcgaattgttacaatagggttgtgatgagacagagtagccaactatttctttaggtgggtctgaccttccaataagtggtctagactgaaaagtaggtaagatgatatgcataagaccaaatatccttcaatttcaagtggcatgattgtatacatggcttatgttttaatgttttcacttttttggagacagggtgtcctctgttgcccaggctatagccttgatttcccaggctctggcaattttcccacctcagcctcccaagtagttgggagcacaggcgcacaccaccacatctggctaattttttgtatttttgtagagatgggatttcgccacagtgcccaggctggtctcaaactcctgggctcaagtgatctgcccacctcggctgcccaaagtgctgagattacaggcgtgagccaccatgcccggccctaatgctttcacttttatccaccaagctccttggtctatttatataatctagtggcactgctgctggggtcttttgattaggaatgtgactgttagaaagtaaaagcaaa

SEQ ID NO: 15 - DNA, 10535 bp, Homo sapiens
ctctgctcgttactaatattgaaacaacagcccttgaattgagtgatttccctagaaaggttaaggtgaccgaatctgaacactccctccatgtcttggacacgaagttttttgctgcgtagacagttttatccccctcaccccaaggtcaattgcacgaattcttttggaaaacaggacctatggcatttcccagacaaatcaccgtgaaccctgtactgtgcattgctgtcctaaaattaacacataaatctattgccgccaaagattctgtcatttgtgttacataattgcctttcatttgaactcattaatcaaattggggtttttaagcaacacctaattaattctttaactggctcatattatacctttaatgacttccaccagggtaaaaaccactgatcactgagttctattttgaaactacggacgtcgagtttcctctttcacccagaattttcagatcttgtttaaaaagttgggtgtggtttcatggggggagggggaagagcgagaggagaccagagggacgggggcggggactctgcaagaaaaaccttcccggtgcaatcgtgatctgggaggcccacgtatggcgcctctccaaaggctgcagaagtttcttgctaacaaaaagtccgcacattcgagcaaagacaggctttagcgagttattaaaaacttaggggcgctcttgtcccccacagggcccgaccgcacacagcaaggcgatggcccagctgtaagttggtagcactgagaactagcagcgcgcgcggagcccgctgagacttgaatcaatctggtctaacggtttcccctaaaccgctaggagccctcaatcggcgggacagcagggcgcggtgagtcaccgccggtgactaagcgaccccacccctctccctcgggctttcctctgccaccgccgtctcgcaactcccgccgtccgaagctggactgagcccgttaggtccctcgacagaacctcccctccccccaacatctctccgccaaggcaagtcgatggacagaggcgcgggccggagcagcccccctttccaagcgggcggcgcgcgaggctgcggcgaggcctgagccctgcgttcctgcgctgtgcgcgcccccaccccgcgttccaatctcaggcgctctttgtttctttctccgcgacttcagatctgagggattccttactctttcctcttcccgctcctttgcccgcgggtctccccgcctgaccgcagccccgagaccgccgcgcacctcctcccacgcccctttggcgtggtgccaccggacccctctggttcagtcccaggcggacccccccctcaccgcgcgaccccgcctttttcagcaccccagggtgagcccagctcagactatcatccggaaagcccccaaaagtcccagcccagcgctgaagtaacgggaccatgcccagtcccaggccccggagcaggaaggctcgagggcgcccccaccccacccgcccaccctccccgcttctcgctaggtccctattggctggcgcgctccgcggctgggatggcagtgggaggggaccctctttcctaacggggttataaaaacagcgccctcggcggggtccagtcctctgccactctcgctccgaggtccccgcgccagagacgcagccgcgctcccaccacccacacccaccgcgccctcgttcgcctcttctccgggagccagtccgcgccaccgccgccgcccaggccatcgccaccctccgcagccatgtccaccaggtccgtgtcctcgtcctcctaccgcaggatgttcggcggcccgggcaccgcgagccggccgagctccagccggagctacgtgactacgtccacccgcacctacagcctgggcagcgcgctgcgccccagcaccagccgcagcctctacgcctcgtccccgggcggcgtgtatgccacgcgctcctctgccgtgcgcctgcggagcagcgtgcccggggtgcggctcctgcaggactcggtggacttctcgctggccgacgccatcaacaccgagttcaagaacacccgcaccaacgagaaggtggagctgcaggagctgaatgaccgcttcgccaactacatcgacaaggtgcgcttcctggagcagcagaataagatcctgctggccgagctcgagcagctcaagggccaaggcaagtcgcgcctgggggacctctacgaggaggagatgcgggagctgcgccggcaggtggaccagctaaccaacgacaaagcccgcgtcgaggtggagcgcgacaacctggccgaggacatcatgcgcctccgggagaagtaaggctgcgcccatgcaagtagctgggcctcgggagggggctggagggagaggggaacgcccccccggcccccgcgagagctgccacgcccttggggatgtggccggggggaggcctgccagggagacagcggagagcggggctgtggctgtggtggcgcagccccgcccagaacccagaccttgcagttcgcatttcctcctctgtccccacacattgcccaaggacgctccgtttcaagttacagatttcttaaaactaccactttgtgtgcagttgaaggcccttgggcacaatgagagccagtcctccaaactttcagaaagtttcctgccccttctggcaggctgccaatcaccgggcgggagaaggaaggaggggaaggcggtggagggagcgagacaaagggatggtccctcgggggcggggatggcggggctgtcctgtaggtctgtgcggccaccgtgattgcccctctgcgcggtgcccgaagtcccgctgaaacctgccgagggcagcaggtctgaaagctgcaggcgctagttgcgcggaggtggcgcagctgctctggaggcgcagagcgaatacgtggtgtttgggtgtggccgccccgcccctggcggtttcctcgttcccctttggttaatgcgcaactgtttcagattgcaggaggagatgcttcagagagaggaagccgaaaacaccctgcaatctttcagacaggtttgtagactctcttcccactcgcagccgcctgaccccacccaacacaacccacgagcaattctaaaagttgcttaactcacgtctaaaaagtgcaaaacttcagggctgcgcgtaaagccctctagtggcgggaagaccacaggttggagcttctcatgattagaaaaatattaataaaaccccttgagcgattttttttttttttttgagacggagtcttactctgtcgcccaggctggagtgcagtggcgagatcttggctcactgcatcctccgcctcccgggttcaagcgatccttgaatgatttctaagcagttccttgggacataaagaaaaatcttttaactttttactttgtttcccaaatgttgcacagttttgcaacacattgaccttctggtttcgaacggttacaattttagattgtggtttgccaaagtcaagttgcttaatttttacaaggccacaaaaagcgcaattatgccctgcagtttaaaatggaaaacgtgttggaagataagaaaacttagtttccaactggaatggagccagcaagtttcttttcttctttgcaaattctattgtgtcattaaagttcgatggaagtatcactatgcacaactattttgtgatctaataagggtgaaaaggagccatctgtccccttggctaaggggtattaatggtttctatgggcttcactatggaatgtagatacagacattctggcaaatgtggtggctctggacagaaataataggagtctttgtattcccagggaagctttgcaacaggctacattcttactgaatatgtaatgatgtaagcacggttctaattggacacaagtatttgctaacatccgttatctaatatctggcccagacttgagaagtaggtaatgtaaaaagtttttaaagctacaagcatacctcacattttaaaagtcctttcttgattgggttcttgtgttctttagcactcttgccataaaaaataataacagtaataaacccaaggctgaaaaactgaattttaactaaagggtttttgtgcgtgttttttttttttttcaccaaaattagatggacttacagaatttttaacttaaaattggaatccaaaagccagaagatccccattatagtttatagttgtattccctggaatatttactgggattaactgcaaagcactctcagatgaatagtgtagtataacattttgaaactgaaatacatttaccaaattaatttaaccacagcaatgtgtgtggttcattttagtccttgagcatttttgattatcatacctgtcatgttttctgcagtgtagtgagttaacataaaacaacatcaatacaaaagatcctctgtttcgagattaagcaaaattcctcattctcttcaatgtgatagaataccacattgatctttctttggaggttagtaaaatatcttttatgtatttttcagggcttaacaagtaaaaatcaatgttttcatcaagtctgatctttttgtcacccactcttcattcatttttccactaaggtgatagaaaagtctcaacagtttaagaccgtaaggctatgaactccaaatataattgctgacaagataagcaatcctcacgcatccttttgagaggaaataaaatcttagttgcaagattacatattctgatttggaatgctgagctttttaaatggaaatatagaaggacggctgaatcagcaaaaatcctttatgtagtttcattctttgcaagcttgaccagtcattctgaaacaggctaactgaactgatacagtggcaagtgaaaaagacatgcctttacaggatgagtcaaaggagttttagaagaaaaatccaccagagaaagccaagcaaatacagttcagagttacatttcttttccattttttcctgaactgaatctttggcatgcatatcctgaattgggttattgaatataaatctagccttgtacaatggatgccagatgactacatatttgctttggagcctaaggataagtttcaaaagatttgagtggagaagaaaagctaaaactcttgaagcacaagtttctgttctccatgtactcaagtgtacatgaagttgtgaaaatttgtccacctctatcatcatgttattccatgaaattacaaaacaaatcttaaaaatgttgtggcatagattttctagatttaaaaagtaattaaattaaatgaattactttattttttgagacagagtgtcactctgttgcccaggctggagtgcagtggcactatgttggctcactgcaacctctgcctcctgggttgaagaaattctcctgcctcaacctcccaagtagctgggactacaggcatgtgccaccacacccagctaatttttgtatttttggtagagacggggtttcgccatgttggctaggctggtctcgaactcctgacctcaagtgatccacccgtctcagcctcccaaagtgctgggattacaggcataagccaccatgaccagccttaaaaagtaattttaaaatatcactggtaaaatgtggattcagtcatgattgagtgcagtttaccatgtgtgtggacatttatttattttaaaattgtctgatcaccaccttgagtaaaacacaagcagtcacaattaaaatatattagtgagcaggagaaagcacagcatattatagcactgaatgatttataaacctattccagggtcataaaatgtgtcaacggcttttctatagtaaggagactaggttcagatggttaatctaagacaaataaatgagataagccatacacttttacatcctccatgtcctgtcttttctctgttcaaaataggatgttgacaatgcgtctctggcacgtcttgaccttgaacgcaaagtggaatctttgcaagaagagattgcctttttgaagaaactccacgaagaggttagtggagtgactttcggggaatgaatgagggtaaggcagcccccacggttggcagagctgaccgtctgtctgttctttttgcaggaaatccaggagctgcaggctcagattcaggaacagcatgtccaaatcgatgtggatgtttccaagcctgacctcacggctgccctgcgtgacgtacgtcagcaatatgaaagtgtggctgccaagaacctgcaggaggcagaagaatggtacaaatccaaggtaggaaacaaatcagtgcggcttcaaccaaagaaaagcattgtgttctcaaaaccccatacctgtgtgtgattcctaaatatcctctagctccaatgcaaagctggctttgacttcttgctcatattgtgtttgccaccacagcctccccaccactcacatcacctcctttatttatttatttattttcttatttatttatgagacagagtcttgctctactgcccaggctggagtgcagtggcaacatcttggcacactgcaacctccgcctcccaggttcaagtgattctcctgcctcagccccctaagagctggaaccacaggcaagcaccaccatgcccggctaatttttgtatttttagtagagatggggtttcaccatgttgaccaggcttctctcaaactcctgacctcaggtgatccaccctcctcagcctcccaaaatgttgggattacaggcatgcgccaccacgcctggccacatcacctccttcagaatagcagactctcttccccctaaccttgcctccaagtaaaccccaatgccatacctttgacctccactgtgttgaaatgagcactgtagagtgaactctgaaaatactaatgtcagtactccactgctctttccctggctttcaaaacagaaatttaaacctatactggaagacattcagtgagaaatatgattttttttttctaagagagtcaaaagacttgaatgtgagcaatctacatttctgttttcttcccaacagtttgctgacctctctgaggctgccaaccggaacaatgacgccctgcgccaggcaaagcaggagtccactgagtaccggagacaggtgcagtccctcacctgtgaagtggatgcccttaaaggaaccgtgagtaccaaccctgcagtaaaagagggaaaataatgacccattctgctgactaggctcatgatgatacctgaacaaaatgttgagtgagtaaaaatgtatatcataatgcaaagaaaatgagttatcaagacagactcaaaagggacttcatggaactcttgaaggttttagcttgcctatatcattgcttctaatatgaaggacttggtactcgcattctccacctaaaattagagtggtcgccatttgccgctaatggaaattattgcagaaggtctgtaaatggttctgggaacagctgggtttttctgagaaataacaccagacatctttctcaccccctgcagaatgagtccctggaacgccagatgcgtgaaatggaagagaactttgccgttgaagctgctaactaccaagacactattggccgcctgcaggatgagattcagaatatgaaggaggaaatggctcgtcaccttcgtgaataccaagacctgctcaatgttaagatggcccttgacattgagattgccacctacaggaagctgctggaaggcgaggagagcaggtagggaactcagacttggatgcgtgaactaatggtgaccatttgttaggccctgtgccactgggctctaagcagtgtcacatttaatctttagaaagtttctttgaggtaactgctttccactttttgtagaggaggaatttgaattgagagagagtaagtgacttgctgaaaaagggttaatcaacagcagagctgggatttgaacccataactctgtcaaagcctccactcctaactcctgttcatgctcctgtggagaaaatgcttgtagtaacatattttaaatgtactaacaagaccagtcatgggaaaatgtttctgagacaaatctctagtttatgatttaaaacagtacgttttcttacgtgacgaaaacaaaaagtgtgttaatttgttcccagtggttgaagttatttgccaacaattttactgtttctcttcatctgtttataggatttctctgcctcttccaaacttttcctccctgaacctgaggggtaagcattttatttccctttaggaaaaacgtcagctgcttgtaaccactgtgtttatgtcaaagcattcattttttttaggatatctgaaaaaatgccatataagagaaaactctataaaacatctataattttcgaacccaagtacactcttgcattctatgctttaagttaaatgcaaactcctttttccttcttcctgctgcaagtactatctcatcctgatgctcaagagtgtcagggcctgggtttccaaacagagactaccctaaaattatttggcgagtagtactttacacaattgcctctcccccacaaatcataattgtttcagtaaaatggttacttggtttttccaagaaaaaactcgtttttactcatttttggcctgtttgtttatttagaaactaatctggattcactccctctggttgatacccactcaaaaaggacacttctgattaagacggttgaaactagagatggacaggttggtatcttttaaggaaaaaatagggtaatctcagacaggagttgatatattttaaaatcagtgaatctgaatctcagatacagctggctaatttgagaggttcaggtttcattcatgcctactaaaaaaagaataggcttcttcttccagcagtacacacagccaactaattatttggctcctggatgtgaagttgagatagcagtcttcctgtgctccagaattagtgatttgctttggtgcttaatttgaagtgggagtaagcttccttaaaccacttcctaaagcagctacatgaaacagcttcactagactacctcaatatgaggaatgttttgatcctggacatatggtgtcttcctacctccatactttatagattcctaaacccatctatataatacaagcatgtgccatacgatcatttagtttcttattacctccctatgccaggaaagaaatagttgcaatttattgtagtcatcatgaaatcttcccttgcacataaatttaaaatgtacctgctgcacattttaatatgtcttaattgcttttaaacttggctgtattgtgtacaactattataccatcttttataaacacagttttttaagaaatttctttttgtaagttacaacattccactggatccttatattgcctgtagtggaagagggtcttgtgtgtctgccccttctagttttcactcatgcagaagcaacataaccttctgatttgcacaataaattacatatatttagcaggatttttatttgccgtgatatataggataatttagtctttggcatgtggcattatatttattttggtttttttttttaaacaggttatcaacgaaacttctcagcatcacgatgaccttgaataaaaattgcacacactcagtgcagcaatatattaccagcaagaataaaaaagaaatccatatcttaaagaaacagctttcaagtgcctttctgcagtttttcaggagcgcaagatagatttggaataggaataagctctagttcttaacaaccgacactcctacaagatttagaaaaaagtttacaacataatctagtttacagaaaaatcttgtgctagaatactttttaaaaggtattttgaataccattaaaactgcttttttttttccagcaagtatccaaccaacttggttctgcttcaataaatctttggaaaaactcttttgttgtgttatttattggataatatctaaacaattctctacttggtcctattagttaatttgtcattacaatcatgtaagttgataaattcaggttatttatgcttgagatgtagttcttaattttgtcatttttgatagacctcacttctttttattattacttaaaaacatttacaaataggtggtgtcgaataaaataacttgtaccaaaatgaagataggtctctctaaaatgagctcaggtctgtgattttaatcataacaaacagacttcctaaaattaaaaaataaaaactttttttagtacatatagcatatgagtaacacaaattccactttgggagttaaagcataggaagttgccaagatataggggcttatcttccgctagcaagatgcagagaaatggaaaaagttcaccaagtttttcttttatttaagacaggatctcactttgtcactcaagctggagtaaagtgactcaatcatagttcactgcagccaacaactcctaggctcaggcaatcctcccacctcagcctcctcagtagctaggagtactcaaaacaaataaacgaatgtctaactttagcct

SEQ ID NO: 16 - DNA, 98930 bp, Homo sapiens
aagaccacaccaggcacagggcatgaacaatgtcaaaaagctactgccctgcaggacactggggctggaacaaagatgcctcccagcagctgggcaaggctggctcccacacaagaaaagcagggctgatgtgagcgtcccgcacgatccccacctgctgagacctaatcctgggttatctctccgctggcccagagaaacctgaaaccccccaggcttttgaagggctttatctcctctttccaggaactgggctcagtccctgtactcgctccgaggtgccactgagcagctgctgcccagagcccaggcgagccctggtcccatttccagcttgaccaagtacaagaggggagccagggctgcggatcctactccctcttgctccccaggcatccgtctcacaattagaaaacccgtgtggggagcaaagcaaaaatcacatttcactaacagctactcggggtcgggggcgggcaggcgggaattcctactttcgccataaattgtatgcaaatgggttccttccctggccgagagccaggagtgagtgcgtctttcatgagctaaccctgttccgctgggagggctgttcctttaattcgccaactgaaaaagtgggaaaggatgtctggaggcgaggcgtcccattacagaggaaggagctcgctatataagccagccaaagttggctgcaccggccacagcctgcctactgtcacccgcctctcccgcgcgcagatacacgcccccgcctccgtgggcacaaaggcagcgctgctggggaactcgggggaacgcgcacgtgggaaccgccgcagctccacactccaggtacttcttccaaggacctaggtctctcgcccatcggaaaggtaagtctgttttgccctcatcactagagatccttatgatgtaaggattgcattcctggtaccaaatgagttgtgattttatattataattacaaaacatatggggtttttttttccaccgctggaaaaaaaaggagtgtgtattggttatatcagatgcaccttgacttttctggtcttgtaattttgtttgttttaactttatgaatagtcagacttggaaggaacttttcgtaaagttgttatcttctgctgttctgcagaggaaaagtaaaaattttctcttcaactgctctcctacttctagtctggctgattcacctgtatatatcttttattttgagggttagggcagtagagttttaaggcagactttgctcatagcctgcccctgggatgggttagagggagtttgatagaggagtgcagggagaatataaaagtttatatctaaacagcacttacataaagtttacaaagagttttgtacccattccctcatttggtcctcaaaatattcaccctggaaatgagagctgggggacagaagagaggaggtggctcctgggccagatgaataactgacaggcagctagagagtggtggagaacagctttactggggtgcctagagccagcagcgtcccacatgtctctagaatcacctcctcctcctcacctctcatcacagaaagatctgagcaacaacatcccccaggtatgggaaccctgctgcccctggtgtactttggaaagaacacaggggttcttctcacccatcagtgttgtaagaggaataagagcttaggtttgaagccagaggtgtttggtattctccccaccaccatacatatgaccctgagaaagatacatcacttccttaatcctcagttttcacatctctaaaatggggacaatagcgtctgctgtcgttttgaggagaaaatgaggtatagaaagatcagcaatgactgcttaataactggaagtttggataatcattgtcattgccaaaaactgccatcactctggaagttaaaagaggcattgagccagtcttggattgtttcttgtgtgttgttcctcagcccgcccccagcccccgctttttatctcacccaatctgagggtgtctcactaggctggcaggtctgagacttggctgtattttacaagcaggaggttgtgttggcacaggttggagaaaaggtagtagcccggggctggaagttaatgtcaaattttgattccagaatgtcaggaggttttgagtttaggcatctgcagattctaaagctgacagctatgaagtacgatgctgttggaaactctttggaaaagctttctgtccggagggagggcaggacagggagcaccacttgaagaatgaatgcctctttttcatgtttttgtagactttttcccccatttttacagagctttcccatatgtgttttagaaaggaaaactactatccatcccagccaggcaagcccaattcaggactgaagaagatttattcagtcctagacaaccaagtgaagagtttctggctttgtgcgcatacaagtcatttgcaggagatgtaagtcagcgtgctttggcccttgcatttcaggaaggtgactgctttgtggggaagaaaaaggtgcacaatatgagtattctctggtttgctcaaacagggtaaattggacaaggattgaaagggatgttgccaagctctacagtcattaaatatttttttcctctatgctttgttttaaaaacctagcttctctattttatcccacactaacctcctccttccccactctaagaagtgactaacgtttcagccctcaactttgtcattcatataatggagatgacaaactatgtctcacagggctcttgcaacattcaaatgaggtaatatatggcaaacacttggcatagtaccttccacatattaagggttcaataaatggaaacttttcttagtttctctgtttatcattttacaaggacttgtccaagattaatattctaagatcatgatttttaaacttatttttaatgatgaaaatattcattacatgaatttagggcaaacccccagtatatgacaggtaaatgcagggctgctttggttgaagtggggtcacaaggtctaaaacttacacctttgctcttagcctctgggacattgccacagaatcttcaatgacaaaaagcacatttacaaatcatgaaaccaggctgtgtgcattctggttgccattctgcccttcaacaaggatttttgcccctctgagtcaccatctgtagcagaagtaagagcaagtccacaaatagtgtaatagacaggaatatgaatgagaaataaaagacttaacaaaggctattttaattaattctaatgacaatgatagccaaaatatatgatgagcctactctctaaactgtaggcttttgtgggatcatccacagcatgtctctgaggtatggactatatttgttggacaaagagatggcttcaagaacagggagactgaataactttaccaaggtcctagaactcagagtgatacagccaggtttcacacccaggtccccgtgatcaccaagtcagaggtacattctgccgtgttccttctgaatgcttctctgcttcttgcctgcctttagaaggaaaacacttcctttctgactaaatatgcccctccaggcagactgtggccacccataaatacagcagtagcctgatcatataaccagaatggaatttggaaagagaattcaagctgacagaatgaaaaacatatcccccttaatcctaccctttctaatgctaacaataaattaagagcacatattctctcctctctctctagatttctatagacacctagctgtgctttcttacaagaaaacatatccactggaccaaagcgcagcccccttcatgctgaagccacttcagtttgaaacgtaaaaagtaggttgcaaacatttagttggctcgaaatatatgtccttttgtgatggtaaaacacacaaacacaaagttaatagtgtcacatatgtaataggagggtttgccaatggtttctcatctcattctcactcagacactacaaattataaattactagctcaattttaaagaaatcgacactcaaggaagttaggtgactcatctgaggtctttccgtaattgaggggcagagctggctttgacccaagctttctaactaataccccactgttctttctgctgtgctatattgccttctgaagtcaggctgtgctgaccaagtttagaaccttaaatggtgtctttcagtgaatgatcaagatggtggagaagcccccagctggcattggtgcctattgattttacagaatagccctgcatgtatcatttttcatggttctcagcaaaggtcagctctcaatggtgcaactctctgcctggaaacaggaaagttcaaatttcagccctggaagagagaagaatgaaactagaggtagcagtcaggtcactcctgctgattttcatctcagaaaagtaggcacacaggtgagccaaacatctggttttaaaagggctgattggtaggtaaagtgaaatcggccttggggccatgaatcccaggacagcttggaaatggttgtaggctccgagccacaaattgagccacaaattcagcggaagcctcagagaggaagattatgattcaaatacctctcactctgagaagattgtagggaatccccttgaatcttatcccgggccagtttgaacaccttcaacatgtgggaaacattagatgaaggctcccttccaaggaggaaaacccccctcaaagtgtgacatgaccagcctcctgcaaaccccaggccataattccattcaatgtaaaagacagagatggtgaacttacctaccttcgggggctatacatgctttgtgacttctctgtaaaggagaaaagtctgcaaaccaacctgattctaatcctggtggccagacatttttcagttatgcccttaagcctaaactcctttccctccaccttgtctcacatttccagcttctcttccactttagaaacaaccctgtcactatcattactctctttggcccttcatcatggaataaaagcaaaatgcccaagtcaaaagcagatcgcgaacggaaaatcccttccatgtgcatttttagtctatctgtgaatggagattttaaaaatatgtatttcatgccacgtcgtctcagaattttgaagtttcctgaagttcataggtccttcatgatatagccatggtaacttaaatagctttgtttggtcctttaaccctcctcaaataccctataccaagagccagagatatatcatgagttctgaacatagatagctttgcttcagaattgaccgttgttcacctctaaccctaaagctggctgctgctaacttcgacaagaatgtgtctgaaatgttctcctaggagaatcctaggggataatcgtaatagctaatatttactgaggactctataggcatcatgccatttagtcaaccatagcttctagtaagtcttatcacccaccctattcaaatatgcacaatgtaaggctgaaaacgtttaagtagcttacccaataccatgcagaaagtacttggtggagttaaaaatcaaacccagttcccagtcctgagaggctagttataaccatttcagtaaggaagtcatgctcagctccctaattctattcatcttctgacaagagagagggctagacacagcaaagctaagaaagacacaaaagcttgtctttttggccctggtgttctttgacagactggttaattttgctatctccagcttgctccttcaggcttcacctcttgaaaaaaactgtaattaaatgattagcatgtgacccataatgtaatacgttttctctactagactttaagctacatgagggcaaagcccgatccacatcacatccctgcaaccagcctgagacctgaagcatagacacacataagcaagtgctgcccaagggaagccatgagtgccctgcaggctgcctggaatccccctgctccaggttccaactgagctctgcacgtcccccactgtctgtgtcataattacccctatgattgccttccctgccacactggactgtacaccactgaggtcaagaatgttagggaggcgggagctttgtctgctggagttcattttccccaaaaacggacccaccatgggcagacgcaccattagcacagtccccaaaggagatgcccaggactgtgggatggtcttgtgaaggtcgatgcacagatattgcagaggaatgctttaacttctaggtaggttactattttcttaaatctccttagggaatacagaattttcaaactaaaagggcttacgggcagcctctaagccagaatcttgcagactggattttaaaaagaatttaaaaagatttgggggctgctgtggagagacagggaggccaagcaggggattcccctcaaccttatttcaatgaaagcccctccacttatctattttgtacactgagcctcctcatgaaattttatttgatgaaagggctctgtgcagaaaaaacagaatgtttttgtaaattgctggcctaggttagcatacctcattttaaagagggtgaaactgagacatagagaagggaaagatctttctaagatcttccgccagttggcaacagggtcaggttggaatcctaggtcttctgactcttgctcttggaagccagggacaatcttaaaagtttcagaattaagacattcttttagaaaagaaaaatgagcagagtcttattctctcaacagccttaactcacacggaccgagccaaggatgactagtatctccgtattcattatctattactgcataccaaattactttaaatcaacactcatttattatctcatggtttctagaggtctaagcacagcttagttggattttctgcctcatggtctctcatgaggttattgtctgtgttggacagggttgatgtctcatctaaaggctgaattgggggatgattagcttccaagcttgttgatgtggttgttggctggactccatttcttgagagatattgaactgagggcctcagttccttcaaagctgttggtccaaggctaccctcagttccttgccacatgggcttctccaacaaggccatttacattaacaaagccaatgagaaagagagttaccgggcatggtcgctcacacctcttaatcccagcactttgggagcccgaggcgggtggatcacttgaggttaggagttcgagaccagcctggccaatatgctgaaaccccgtatctactaaaaatacaaaaaaattagcctggcatggtggtgggcacctgtaatcccagctactcaggaagctgaagcaggagaatcacttgaacttgggagtcgtaggttgcagtgagccaagatcgagccattccactccagcctgtgcaacaagagcgagattccatctcaaaaaaaaaaaaaaaaaaaaaaaaaagagagagagagagaaagtctataagcaagaggcacatcacaatcctgtgtaacctaatcatggaagggatattccatcaccttagtcatattctgtttgttagaagaaagtcactgggccatcccacactcaaggggaggtaattgcacacgtatgagaatgccgggaggcagtatcaatggggccaccttagagtctgcctgccacagcctccagcactccagtgtcaccaatttctggcaacctcttatcaatgacaagttcactcaacccttcagtaccctcactgatgagtaataaaaaaattgatcgagaccatggtgaaaccccgtctctactaaaaatacaaaaaattagctgggtgtggtggcgggcacctgtagtcccagctactcaggaggctgaggcaggagactggcgtgaacctgggaggcggagcttgcagttagccgagatcacaccactgcactccagcctgggcaacacagtgagactctgtctcaaaaaaaaaaaaaaaaaaattctggcagccactaaagtggactagtttttatttaacatcctcccatgtatatagtggagccaagtgttttgattagttgttttaactcattggttagccataatttctcttgaatttcaccccagggaggggcctttcacggcaatgattccaaatgtattttattctaaagcaagacagtcagtgtgaccaaaactaaaactcatccattgttcctccctcaatctattcctctcagcagatataatgaatagtaacatcttcgattaattcttttttctttactaaccccacacacaaaatgttgtagtctctactgccttgacaagcaaatctgttcactgcctccccactttcttgatcaccaccccctgccccacctccattacccctgtagttcagatcttagcatctcacagatgggccactgcaacagctttcccactggcccccagcaacccagccttccccttcttcaacctgagacatagaggttaacattcctgggcctcaagatttccaaatgcttttcttctgcctgcaaaaaagtccagatattctgacattcaagattctccatgatcttgcttctggtctctaaacagatcctgtacttcagctgtcattcatactgttcacatcaacccttttattctttttatatccttgtaaatgccattccctcgtgcctagaatatccttttttatgtttttcacctattcatatttttctctcaaaattcagttcaggcaccacttcctccaggtaaattagatgcccttttactgtcatctcattctacctatgtttctttttttaaatctatcatctcctttatcatcctggaatggcctgtctgcccctcttgacaatatagttcctaaaagaaaaaattgtatctggtttatctgaaacctagcacaactggaataaagttaatctttagcaattaataggagtccttgctgtgtcccagatttggacatcctcttccttagcagtttgctcagaaagcccagagcttgaagttgttttcacgcttcacccactggcttgcaagtatgcagtgtgatgacacaacatgtgataggaggaaaccatcccagccctaggacaggaaactgtctcaggacacagacctcaaggaatgtgtttgctttcagaggtggccttcaggataaaaacacaaattgctttggatttggaaaaaccagtaccaaggacagaggagtcctgtctggggatttgaggctgagtcacaagagatagctgaaaatctggaggttataacaaagattagtcaacaactaataggaggaaagaacaggctcaagggtgggatggagacaaagagctctctatcttaggacatggagaagctcacagcccacaagaagaaatgaataatggttaagagtatgactttggcataagaatcctctgggtttgagaggtatttgcttgctatgtgatcttggccaagttacttagcttctttaagctaatttcttcttatccatattaaaagcaaagtagtagcacctagtttaaagtttattgtgatgattaaatgatgtagttcatgaacactgcttagcacagaaactggcattcaatataaatgttttgttgttgtcattgttttgttacctgttgatcaaatagttcttgatgataagatcccactagagaagcagttcccaaaagtgtgtcatgtggaaaagcattctcatgggaatcacctaaaaaagggttttgtggccaaatgagtttgggaaacacttggtactcttctgttcttggaaatgcacagctcatatgtccattcaatacatagttttagggctggtgatacaatagaaagcaatacagtcaagatccttttattcatggtgtttacattatggtggcatatcttagtttgtacaagctgctacaacaaaataccataaactgagtgacttacaaacaacagaaattactttctcacagttctggaggctgggaagtccaagatcaagatggcaccttatatgtcctcacatggcagaagacataaggcagctctatggggtctcttttaataagggcacaaattctatttatgaagcctctgccctcatgatctaagtacctcccaaagactctgccaactaatattgtcacactggtgattatgttccaatgtgtggattttgagggaacacaaacattcagaccatagcagggggaaggcagacaataaaaaggaatcacataaacttatagcacaatttcaggtagtgatatttgctaagaagaaagacaaaacaaggtaagggcataaacaatgactggtggtgagaggagtgctcttttagatggggtgagaggtgaatgtgccattgtgcagatgtctgaatgaaatgagagaaggagctctgtaggcaatggctaggagtttgaatttcattctgagtgtggttagaagccaatggatggttcagggaagtagagtgcatcatctgagatatcttgctgtaattaatctgttcaactttcgttagcccagtatctccaaacatacctgaccataggacatctacctaaaaacatcttgcaacgtagtctgggaaattcttcactggagcacaaggcttcatagattttaaagggactgcaaatttgctcttgttcatctagatctgcactaaaaatccaaacatactgcttgggacaaaataggcatgcccaggaaggaaaacctagctctagaggtagagacaagcaggatgtcatcctaattagcagctctttttggcaaagacaatcaatgagcacagccaggcctcagcagattctggaagcccatttgatgccaacggaaactcgccaatatctacccaaggctaataagtgtttgcaaacagtacaccttggcttaagtattctccaaaaaggaagtacataaaacttgagatccagccagaggttctgggagaaaaacagaggtcaaatattttggtgcttacatgtgcacagccaccaaagagctgctgaaggtctaggaaatggaaagtgagttcatccacttgaatgctgatctctttctttatggagcagtaaaaatttaagtttttaccttatctgaactaagaaaattcctttaggagtcagcccagtgtagctcaatgtagttgaaagcagacattttagaaccacaaataaatcaggattcaaaagctggctctgcctcttaagccagtcatggaaactccctgagtctcaaattaattttcaaataagcataataatacctaactcaccaggttgtcatgacaaatgacaagataaatgatagcatgaataaaaagcatttagtgtaagatttggcataaaaatgtatataataggcactcaacaaaatgttagtttccttattgttcaattcaatctgtatttagtttcataatagaagctgtcatttattgaataactactatattccagcagaggttagcaaaccatagggtggcagcctatttttgtaaataaagttttattggaacacagccatgctcatttgtttgtgtattatctatagctgctgcctctacaatagcagagttgaatagttgtgactgaaatcatctaactgcaaagctttacatattttctatttggtcatttaaggaaatgtttactgatcccttccagtcaaccttactaaatttttatacttactttccagtcaccttaacctaacaaggtggatattatcatacttgtgtatatagagattgaagcagaaaaaaaaaatcatctagtaagttcccctccaaaaacataatgccaaactctatacctaaaagaagttcagaataatgattaaaagttattcatttgtatgattcatcttcatttgcctctgccttcctctgactagtatttctctctggctaatttcttgaatttcctgccatatgctgaattaaatgatcctatttagaaggaattttccctcctttccttacttatacaaataagttgtttgttcatagaagtccatgctttcaaaactgaaagtggtaatttccagcccctctgaaacgctctctgatcttgactgatttcttggaaaccacacgttttttagatagtacatagtgtgaagcccagttttccagaaatgatagatttttagctcccccatctgctacttctcactgtatcttcctctcacttattaaccttctcttcaggtcagactcaaggagagcaggcttttctccaggggctttaaagatttgcctaagacacagatattatagtccacctggcctatgccctcccctcaagttcacaacagtaaataaaatagttatgtaaaccccaattcccaaacaccatcctaccttgttccattttgcaaatccaacaactctattcatattaatgatattgtgtttctctctgatagttagtagataaatattaattctttaacttgaacaatgaatcttacttcaaaggtaacttgatatagcagaaagagcatagactttggaattataagactgttcttaattctgattcaaataattgctgactaggccacttacttaaccttcttaagccttcagttctcttaccagtaaaatacaaacaatgctccctaattcccagagttggtaacatgattaaacagcatttgtaaagtgccacgcacagtataaatattgacctacttgcttcactcttagtttaaattgctcaagatcctctaacatagagcttcacattttatcccagagaggtcatagttaggtatatctctacttccttctaatacaggaagaaatgaaaggagtaagggtctaggatttgttctctatcagttcttcccccatcgtgtgccatccaacctaatcctgtgactcacttcaaacagaataatcaagtagatttgggaaacactctataaactgtccccttcttcgagatttccaacgagcatgaacctattaaacaccctggaaaaacctgaagtaaagaaagttgtgtaatttgtttggcttaaaatcatatttggtttaaaataacattttccaaacgtgtttaattaggaaatctttttccctcagattagtacctatcaacgtgttgtagattacactttagaaaatgctgtttaaagttacacagctaagttaaagccaagttaagggggttagacatatctctatttttcagatttttctgcagtttttcctgtcctgcctgtagatcataaagatatttcattaccagtagtttctctggaccccgaccttagttatgcaaaccaccctttaacataattaaaacaagtgaatcagttcacctgatttaaatttctgttccccgtttctagctatgtgatcttgagctgtgtgagcctcagttttctcctccataaactgtgaaaaataaagacaactacctcagaagtcttggggaggattcaatgagataatccacagaagacacaaaaagcagtgtctggcacagacgacatatgcaatcaatgttcattattattatagcatttagatggtcccattttgggaaagggaaaatagacaatgaaagtatgtttgctttgcctgaggtcacacaaattaattacgggagtagtcttagttttccctgagagtctggtttcctgcttccagtcctagagacgtatttttgtttcatgagtcatattctatcaaaatgtatgagactttattgaacttgatttaaacaggattttgtaattgtcaatggctccatctggctccttctgatgcaaatcccactcaagcaggattccattcatttgaatattagcacattggatcgggaaagatttccaaagctgtctagttttgctatgccaaatatttggtgtacacgtcaacactctccactcctgtacccatggtggatattgctaatccatcacagcaccttttcccgaaagcctaatcatagccacagaatctttctcaaggcagttccaggtagctatgtcagctctttgagttgaaacataattgatcccaaaccaattctacttcttaaccagtgcttgaaccacctctacactattactcttttattttttaatatgcccaatgtcatggagctctctcataaagggagacaggaaaaggaaagaagaggagaagatatactaacatatgtgtaacgtttattattaatatgtcaggcacttatagctttgttgtcccattcactgcctcaaacaaccctggagagattttatagttgaataagccacaattcagaaggtataggacgttgtccaaggctccccagcagataagtagaaattggtcttaagtcttcctgactctaaaggcaatgcccctgtctctcccatcacaatgccttcttaaaatttttcagggtctttcgggactaaatttctgactttgggtggctgataacagtttcacaaaggcaaccatctcacagacccctattcagaagttctcttatttagggttgtgttgtaagtctgtctgtaatcggttcttcctagataaatctcttccatttcttaaccttggctcaagactttgagaactcactattcaatgcttctgaaagagccaactagatttcttaaaattctggatgaagaccaaaatagaagaggtcattgttccattgggaaatgaattcaaatttatttttgaaataattttccagaattttacaggaatctatattgttgccacttgtccagaaccactttttattttcttttctgtctaggcaagaaatagaagagagaaagcaagtgctctgcagttttatttcaaaaattgaaaccagaccacaccagggcagtttgtggtctgaatgtatcaatggatctagtcatatttcatctgagcatttcttaggtatactaaaccacaaatatgaatctcattattgtgtctggatggaaatattttatggattaagatttgtggatttaatttggttggtaatggaacttctgttcaaggggcaggagggaggaagtcgtgaggcaccaccaatgcttaagccaaactatggaaagaaacactatttggagggtttgtacttaatgttggccagttgacttgggtctaaagtgaaattcaaaattaagttcaacaaaaatattgtgaaattagcaatggaccacagatcactggaaccaaagggatcttagaattggaaaccatacacagttgctcattttacaagagaaactgagacctcaagagtggatgcgacttgcccaaggtcacacaatgaccctgttggtcagacctgcttggcagaagaggagctcagagcttctcctccagatcttccatttattgcacttcctgttatatggcctcataagaggccaagtatctgggaacttaaaaaaaagtaatgaaggtaaaaatttaaaatgagaaagggagacctatatttaacaacagtacaacaaaatgataaatactgcaatgaaattgaaagggttactaactaataacccaggatgcttccttcacaccaaaaccaaattttcatgctgagtgcatcttaggcctggccaattccaccttctgccaaaggagtttacttgatcatagagaaatcttgtctcaaagtagaaagtactgagctcttaaaagcccttgggttgatgtctagaatctcatgggaaggagctaggtctgtctttgtcacttttgtaccttctgcacttagtgtggtgtctggaacgtagtaaatactcactgaataactgaatgaattaaaacgaactaattacagaactgaggctgtgacaaattccttgatacatcttactgtagaagagattacaggagagctaattacattagggccatcaggaaagtaagagtatttgttcattcattaattccacaatataagaacctgctatgtgtaagttcaaaccaagaaatacattcagcttcatttcatttaatataaacatattgtgcatttactatgttctagataaagtgttttgtgttgtgcattcagagatgaatgtctcagatatatccctgccctcatagagcttatagtctacatacaatctaactgcacatatgcaaaccaactgtttatagactaatataaatacaatctagaattagctaatttcctaagagaaggagttatgcatgcataataaagccattccaaatctttttttaaatgataaatcaaataatatcatatcaattccccagacaattcagaagagagaaagataaatttaggccaaagttacctgataaacctttcaatagtagatttctttaagcagcatcttgaaggactgatagatttattcatgcagagatggcaaaaaggcttctagaagccttcaaggcatctggaaccctcgctgaatgatcactgagaaatggaagcatcccaaatgtatctgtcagcttgcttcatctccacagcagccacaggctgtctggcatcttaatggtctacttctggaggattgatagtattctgctttgagccaggtgttgggaagttatatagtcagaggttggggctggtcttgactcatagctcctttgcttggccctccagcacaaaaggctgtataaaatcatggttcagagccctgactttggactcagatgggatttggttcaaatcctgactccataacttaataatgtctgaacttgcacaagccatgtaaagactctatgcctcagttttttcagctgcaaaatgagggtacaaatactatctcataattgtatgtgaatttgaaattggaaatgtaaaatgctaactaagcacaggctctggcaaaatcaacacttaataaattatagttaatgatatctgtattacttatgatggtgatgatgatgatgtcaacttcctgattattattattatgtcaacttcttaatgatcttccaaggccttttcaaccactatttggtgattgtaattctttccttttctaggaagccccccatgaacttcccagtgcaaagtgtcacataattatctcattcaggctggcattaataccagaccttgcttgtgtatgatattctagtttctgagatctctaggaacaaaaaatagctccttacttggcctattttccaaagtacccagcacattgggaggtccatactaagtaaatagcatttcgctcttgaaagaatgttaacatttatactcttgctattggcttgggagagtgcaccatgttcccaacctgcagtggcacttaagaatatcacaaatactaaatcaactgtacatggagttaaaatcaattgcggccaggtgcagtggctcacgcctgtaaccctagcattttgggaggcagaggtgggcagatcacctgaggtcaggagttcgagaccagcctggtcaacatgatgaaatcctgtctctactaaaaatacaaaaagttagctgagcgtggtggtgggcacctgtaatcacagctactcaggaggctgagacaagagaatcgcttgaacctggaaggtagaagttgcaatgagctgagatcgcaccactgcactccagcctgggcaacagagcgagacttcatctcaaaaaataaataaattgtattttgtgactctttgggaggaaattatgagctttgcgattatacagaacatgtttatcttctttggtgttgtatcgtttatacttaactcagggcttggcacgtatgtactgaaaaagtagatagttggatgaattgatggatagatagacagaaaagtaaaaaactcatcagggccaagaagtctagaaatactttaacacaaatgctctccaggatcccaccactgatatttctctctggagatcattacaatgacctcagactaagaattactgaaagactttcatatgcatttttaaaggtttttttcccccagctttattgaggtataattgacaaattaaaattaaaattttatacatttaaggtatacaacgtgataatttaatatatgtatacattgtgatatgattactagattcaagctaattaacacatccatcgctttacatagttacctctgtgtgtcaatgataaagacacttaaggtctactactatcttagcaaatttgaagtatacaatgcattattattaactgtagtcaccatgccgtacatatgcactcctttttgaaggcctcccaatggtctagaggaagagatagatcttaatcgaattccttgacccaaaggcaaaatctctggattttaatatcagctttaggagttaattagtaaagtcaccactgattagctagtgactctgggtgtttcaattcagttattctcttaaataactaggtattatggcaaataagtttcatgtgatatactacctctatttatatactacttaattggctgcctgaagtgatgatttagaatgattcttaagtggggctcctcagaattgtgttgttatcgattagctgtgtctgccccatgcactagaatgaagtgttttgtgccacagacttgccatgcctataccaaatgatcttctacagttgcttctaagtcctgctcaagcatgattttgatcctataatttgatgtctgtctgtgtctttggaaagtactgagaagctgggccaaatgtttcccgttaggaacacagtcttgaaagactaaaccacaggcagtctattcagtagaaagccctggctcagcagcatggacagccatcccaacagcagcactgcccctgaggaaccttggccagggtcctgacctcccagaaaagagccccacaccaggctaattcatttgcttttcttgctactgagttagaagagataggataacaggaaaaccagggctgtagccacagcctcctcattttcctaaaaattttagagtgtccctgctacttgacaaattgaaatactaagatttatacatttccatggaaaaagcaacagtgggaaagagagggcttcccagatttgtcttatagatctcatccttcagagactagccttctgttagaaatgctgtctccaagcacaagacagaataatcatataataccaatacacaccagttgctaaggtctccatccttttaagtatttgttactgagtgttttgcctgtattatctcatttttctcactttcagttgaaagaactttattgtgcagttgatattagtgttaccattttacagatgtgaaaattaaggcccagacaggcaatgttacacaaccaaaacagctactggatggaaccctttggatttgctactacccaactatttctgacctaaaagagtggtgattccatgtggttcaaattaatagcaagtggcagagtaaagatctaacagtgtttgactgatgtagagcagatatcctcaaacattgcacagatgtttcttggatatttgtccatgttagtatttatcattcttcacaacaagtatctgtttacatgtctgctttctatacctgactgtgagctcattaagggcaagacctatccatcattggcttctgaaacaccccaccaccactaggctatcccatagcccgttcttacacttgttcaacacatctctgttgaatgcaagaataaaccatttagaaattaattctcagtcctcttggataatcactggctcccccagcatcttaactgggcaccagctaagccactgtgctgcctaaatggacaaccacttctcagttctggaattcttcaaacacctagggttaggagggtcttcgctttggcagttagagttttctcaattcttttatgacacaggttgcaccggactcactcaactatggagatcagatgtcctcaggaaaaaaaaaaaaaaaaaaatacacacttaaggctgtttcctggctcctctctcttcctgacacattccaaaaaggaatttatggatgttgggaaggacaaagggtgaggaatttctaggacatttaagaacgcccatgtaagcaactctatgcttgacaggccatgcacaataaaactctttggcctgtaagcgagaagaaaaatttggtgtaagctgcctcatgggttgccaaaatgatgtggaaacaaattcatctgcatttctaaacaataggaattctcctcgtcctcccaaacctagaatatttcatgtatgtgcttaagtcaacaagataaatatattccatgagctactaaaaatgaaatcataagtaactaattctgaaatatgattctagccagttggaagtttcatctttatctaaaaatgaagttgtttattctccagctgtgaccagggaaaaaatcagattgttgatttcttcgtctagcaatgatctttgtcctgcagtgaggtgcccaaaaataactgttagcctattccctgctgcttccaaaaggttagctaccaaacagctctactagtaaaagagaaaaaaagaaggatttgacagcaagccaagaggcagcttaatgtgtaaaattatgagctaaaaagccattacgactggcatgacactggccttggtttcccaacctggtaaataaatttttatctcacagtaatgctctgaataaaagtctataatgccaaaatctgaagaaatgattcaacactgataacatttaacaccaaggcaattgaaataagattaaagcttaacatttaacccttcttccaccccacactccccacaaaagctttcaggaccattgtttttatcttcttattttttgtagcgggctggggccataaatgtaccaggtatttggagaatgggggactaaatattaaagcctatattctacccagccttctcaacagatgactaactgtgagcagttaggcacctagccttacagaggtgccatattgcttactgagttaagtaccagctcttcatattgatcttttatatccttcccaatatggcttctgccaataccatgtagtctctacctttctgctttcctatgcattattttataccctagtagaacaagacctctccatattccctgcatgctacaccaccttggcatgtatctggcacccacaaggagatgccactattattacagctatcttcttaattctcctcaccacccatgcattccaacttctttgccttttctcatggtgtttcttttttctagggtgctgtaggcttcaatttgaacccacctactggagttgtatccaaccatttttcagaatcttgcccatctttcaagtacatctcaaataccacttttttgagatgtctttcttgggaccttcaatggatatgagttggccaatctcttttgttacttgttataatcatgaatgtatctccctgattcccccatcccttctggatacaaggttttctttctgatctattctctattggatcagtgttgttattaccgctgctgctatcattagctaccacatattaagcacaccttaatgtgtgccaggcactgtgccagtagcttaacatatgtcttctcatttcatcccactctcctgcaacactatgagatagacatatgtatctccagggagaggaggcggggaaattgaggttcagaggagaaagggaatggccatagggagcagctgctaaagtgatagaactggattcgaacacaggtttattttacaccaaagaccagactctttcccccacacgcaactgcttcattaatggaaatgtttagatggctgaaggatatggactgagtgccctcaaaactctggagcacagcagtgcaggacagcagagaaacgggagtcatgagttgtctttgacaagctcctccagcttctaaggagaggctgaagcagacagaaagagacattagacttggccagagtggttcctggagcaacttggttttagtttaacgtggggagaagattcttacgagactctaaggtgtgcagagggaggaagaaaaaaatatttcttaacccaaggacaaggctgggggaaaagatgctgatctgacacagggtagttatctcttcagatctgcaaaggacaatagcattgaggattgcttctcacttgtacctggatatgttcaaacatgtaaggtatggaaactacaatgcacatacatgcttgctatagttaagtgagttagttgctaaaaagaagccattttttctccctaatccccgggctcttgtgtctgaggtactcacccattttcattagtcaagaaacttaacaacattgaaactttcttatagactcttcttgatcgctttgagtctcagtttcctcattttgtaccatgcgcttagtaaaaacaagcaatcctctaaaccagtactgctcaataaaacttctttggatgatagagatgttcttcatctgcactgtctcatattgtaaccacaagccccatgggctcttaagtacttgaaatgtgagtgatacaactgagcaatgagatttttaattgtatttaattttcattaattttaataatcacatgcggaatatgggacagagcacttcgaattcaagaccaatgaattcgaagtgttttatctctttttaaattttctatctcacggggaagtttttattgtggattttatgttcaccagattaactagcttttgagacattgacagggatggagatacacagaaaatctcacaaaaacaatttcataagtcacaggtatttgtttgactctaaaaattaattttaataaagaaagcaaagtctgacacaagtgtgtcttgttttgcgttagatacataagctgaggcggagcaaaaagcagcacaacatgcttagcttggaaatagatttgtcctggatatgggaccccaaaaatctgcgttttgtgccaatgcaaagactatgtctcttcctgattcccttctttgcaatcattgacttaccagatccttaaatatcaccatcaaagatatacacacacttacatatataatatgatatgtaataatatattatctttcattgtattataatatgtaatattatgttacatcacatattataatattatatgtaatataattggagcaactattatattatatatggagatatatatatacatatatatacatatatatatacatatatatacatatatatatacatatatatacatatatatatacatatatatacatatatatatacatatatacatatatatatacatatatatacatatatatacatatatatacatatatatacatatatatacatatatatacatatatatatacatatatatacatatatatatacatatatatacatatatatatacatatatatacatatatatatacatatatatatacacataccacgacatgcatattttctgggatcactgagagaggaaaagttctcactttgctgtagaactcttgtctttgcttaaaaacagacatatgccaaagtaggggtttcaaaggttaggagaaagaaaatcctagaaaagaaaaacattcattaaagtccatatttttcattacaaatgtttccttttattaagctcttactgctaccaaagactgtttgccatttctttcgcatacattatctcatgcacttttcacaatgatcctatgaggactcccttaacacatttattgatgacagtactctggcttatggtcacagataataaccttgcacaaggaacaggaagtgatcaaacagtgattcaaacctaagacaatttgcctataaaacttgtgcccttcaatgccattctatttacattctggtgctttggaacctgctacattctcaaagaagacctttctattgggtaccaattccaactagaaaagtctttctcctgttgtgctgaaatttgtcttctcataaccaaccctccctccctgcatcatccccagcacataaacgcacacacacacacacacacacacacacacacacacacacacacacacacacacagaggcacttgttctgtccttaggggctacaagaggcaagccagtgcctgctttgccaggatttctacatggtaaccctgacccactcaaccttggttttctcaactacaaaataaacctgcccaggtctgtagtccttcctcctacaagatattttccagaccttttattgctgatcaattttctataaagattagaatctgtgttttctaaagagtctctgtagaataagttgctcattctgaaattataaaagtcctactatcagaacatgattcttcatgtctgacctaaatacctccaactgcaatctcaagtaagtttccctgggttcatccacaaaggagacttaaaacagccagttgtctgcatgagaatattttacattcttaaaggtcattatttgcttcctattttttccctctctcatataaatatttctagttctagtaaatttacctcctcacccaccagtgatttctgcagctcctctttgatctagatccaagttgctgctgagtttaggactgtattcaactaggcggtcaagctcaggcttaagtaaaaggaggctattgacatggactcttgttaggttttgttccccaggagcgcaacaaaataggaactactgtttaatgagtgcctactacgagcttgacaccatgctgggtactttatgtacaggtctctaatccttaattttctctggaaaggttttgactcctttgttatatatgaggtcatggtttagagaggataagtagcttgtcaaagttgcagggctagtgagtgacatttgaacccaggtatgcctaattccaaagcctaaccattttctacaacactgaaaatataatggatttttcccaaagtacaaaaacacccactgccctcagaccaccatgagccaataggaaatacacaatgctcaagaataacatactctttcccccaacgatgcaacatttggtggtaccagtttacgtctcttaaacacacagtgagaaatcctcactctactcacactctggtcattattaccctaaactctttgccttggagtctcaatcagcaactataatggctttttagatggaaatttaagtcatttagcaacacacagaaaagtgttggggagaagtccaaaaacatttcaaacttggcccatggccctttctaaaaaaaaaaaaaaaaagctaagaattgatggaaaaggggtaggaaagtagaactttgtgaaggtgaagagagttagagcagccattctagtagactatgcagccaataaatatttgtccagtaaacacataagatggccaaattggtttgaaaggagagaacatgccaagtctccttttttataataatcttcattcagtggccttacctacattacagacccacacattgttagttaagaagctaatttcaatgagaaagcatgctcaaaagagggttgggtattttttgtttctttgtttttgttgttgttgttgtttttgttttgttttgtttttgcagatattacagggacagttggtaaagtgtcaataagaatataattagaatgtggtaggtatgtggatacgaccttcttagttaaattcactagtgctttctcagtccttaggcccctgatcagtcatatagaatgcttcccagttcaattttccttgccacaattcctctctaagttttgcaaaggctttctgtcatgaggaaggagatggtcagttgggatcatgttgatgcattctatcattaggataaaatctttccagaaaaaaagttagaaaccttcttataggctgaataatccaagcaccaccactaattgacataaataactaacttacagtgtgcgagtataagaatatcatgggcatagggaaatgtcaatttgtaaatgacatgctaaaaaccaaatagcagccaggcacggtggctcatgcctgtaatcctagcactttgggaagttgaggcaagtggattgcctgagctcaggagttcgggaccagcctggggaacatggtgaaactccaactctactaaaaaaaaaaaaaaaatacaaaaaatcagccaggcatggcagtgtgcacctgaaatcccagctacttgggaggctgaggcaggaggatcacttgaacctgggaggcggaagttgcagagagtcaagatcatgccattgcactccagcctggacaacagagtgagactctgtctcaaaaataaataaataaataaaatagctcttcaattatcatttgaattttactcgggtgcatctcctaattaaagaaaaccatgaatgacttcatatcgtgtatagatcattctcacatgcctccatagcattgttttagtaaatattataactgccatttcttcctgtctttatttagtttctcaactgcctctaacaagtccccttttctctgctacctgattgctcatacaggtgaatagctctaagagagatgaataagataacttggcaaagtgagaattgcttcatggtagcatattctcctccatattctgttcccatctaattcttctcactatttaaggctcagcttaaattttaccctccctttcccataagctatgccccacctttctcttgaccattcctttttattttcaaaccccataggcagttatacactataccacaaaacaaatcctatacattctttcttgctttgctccttaagtactggatggatgattccattttcttcttaattctattgttaagtcccctgatggtatgtatacacttggtcttatatttatttctaccaccctcagacctctgtaaaaatgctataagtacttgctgattggagaagacatcagaggctcttagacatcctttctgagctgtgagcctcagtttagacaactggttcaagaatattctgtcaggctcttctaaaaactggacttttgaaggttttggaaataaatcaaggagcagggaaactgaggtgcagaggagtagactgaatgctatactgacagtcatataactagtaagaagctcggctgggattaaaactgtttgcctcctagagtcctttattttaacctctgcctctcatgacagaagagaaccagcagatggtgtggaaatcagttttgaaaatcaataagaggcaagagttactgaacatctaccgggaccagggcctttataacactataataattcactcagaagacatagtaaatactgaaggaattaatgaatacacaaataacttctacatcattcttttaaccctgtcattagcaactatgatcttcactatacagaaagtgaaataaggcaaagaaaaattacataacgtatccaagggaccagagctacagccaagatacaaacctatgtctattttatttcaatattttacctttttctctctatttttctgtctccttaaatttacagaagttgaatagtgagtgaaatcattccttcaagtgacaaagttcttttagagaccattgtatgttatttcaagggtatataatgaaaaattatcaggagagcttcaaatacagggatataaaatcaaaattcacttggaattgtagatattcaatatattcaatagtagatactcataatttttttgttcatctttgcttgtagaaaataattctttcaagaagatcagggacaactgatttgaagtctactctgtgcttctaaatccccaattctgctgaaagtgagataccctagagccctagagccccagcagcacccagccaaacccacctccaccatgggggccatgactcagctgttggcaggtgtctttcttgctttccttgccctcgctaccgaaggtggggtcctcaagaaagtcatccggcacaagcgacagagtggggtgaacgccaccctgccagaagagaaccagccagtggtgtttaaccacgtttacaacatcaagctgccagtgggatcccagtgttcggtggatctggagtcagccagtggggagaaagacctggcaccgccttcagagcccagcgaaagctttcaggagcacacagtggatggggaaaaccagattgtcttcacacatcgcatcaacatcccccgccgggcctgtggctgtgccgcagcccctgatgttaaggagctgctgagcagactggaggagctggagaacctggtgtcttccctgagggagcaatgtactgcaggagcaggctgctgtctccagcctgccacaggtatgagctggtggcccgcccagtcccacactgtgcaaacatggagaaatgaagagcatagcagcatccatcacttgcttccaaagtgggctcactagaaaactagcttcccagagtgttcattacaaagagattttatgttcaaataagtgtggagactgcagccatctctctcctgcttggaggagtcacggcgacaactgcttctcagaggaattttcaggcttctgataagtcctgctttgaaaaaccctattttaccttaattataagtttctaaaacgtatttgaccatgaaatctacccactttctaccccaaaacctatgagtacgccatgaaatttctaccccagagagcactctctgataggtactgctgtggccccatcacctcattttacaaatagagaaactgaggcctggaaagaggatgggattcctgaaggtcctccaataaggagtagagttcctcacatttcagtattcttacaaatgcacagtgctgcctgtgatagtgctgagttataagaattagaaaaaagttccaatttaatagcaattacaatgattacaatcatataagctccctctgtgtaacaggcactgttgtattatctcatttaatcctcccaacagccctttaaggtaaagattagatgaggggaagataagtcctcttctacagatcaaagaaatgaatctcaaggggattaacccactggcacaagatggcacaaagagcaataagagatagggtctttggctaggcgcagtggttcacgcctgtaatcccagcactttgggaggctaaggcgggcggatcacctgaagttaggagttcaagaccagcctggccaacatggtgaaaccccatctctactaaaaatacaaaattagcagggtgtggtggtgcatgcctgtaatcccagctactcaggaggctgaggcaggagaatcacttgaaaccgaggggcagaggttgcagtgagctgagatcatgccattgcactccagcctgagtgacaagagcaaaacaccatccgaaaaaaaaagagatagagagagagagagagagagagagatagggattttgcatgtgcctgtgtgtctccagagctcatactctcccatggatgccctgtttccacatgcatcctatttcaaggaattttgctgctttggaattatgtctttatctccaataactaaagttgataaagctacatgagtttcaacaacttcaaatcagagctgaaaatctgtttctgccactcagaaaaaaattaccaaaatgttcttcaacaattatttcaagagtaaacctaaccaccctaagtgaaatagtcttacggctctgcaggacaggctctaggtttctaaggcaatttttaaaaacattttctttaggcataagttagtttatcttccacttctgtcaactccctggaaaaatgcagatgagaatacacagtaggagtaatgctaagtagtcagttaaaatgattgtttagagcagtgctgtctaatgaaaatatgactcacacatgtaatcttaaattttctagtagtcatgttaaagaaaggagaaagaaacaagtaaacataattttagtcatctcttatttaattcaacagagccaaaatattggtttttcagcctgaaatcaatatcaaaattattaatggatacttctcagtctattattttatactatttggaatctgatgtgtattttacacttacagaacatctcaatttagactagccacgtttcaatgcctaataaccacatgtggccaagggccaccatactagatagtacatacttagactctcactttacaaatcagctttttttaaaaaattctttcttcctgctgtcaagaatgagataaaatatattaatacaagctgtttctacgtacagagactacagagtgaatatactctagtgcagagaatatagaactgggttttgtttcttctccttaagctccatggagatcagaccaatgacttctgcaaactgagctaaggcaatatttaggcctcaaggggctcgagtaatgtcaaccttgaccccacattctttaagttgacctccacttagccttcaggatagaaagaaataaaagataaaggcactatacttttctggggacagagccaaactgaaaggtgtccttatagaattagaaagccattagctacctcattttagttgcggaaaattagaatgttttggttatataaacccacataccaacttgagccaaccttccacaaaaaactttggaaaataaaacagaaaaaaataacaaggacacaagagtgagctcttaaggggtttacttaactcggatataccccagggaagtgggctattggcccaacttcacgtataagaaaactaagctccagatagtctaaatcccttgccaaatgtggcatagatattgaatcaaaaagtcagaattacattcagttcaacaactatttcttgggcatcttttatgtgcctggccttgatgaggcactaaagaaataataacatagtggccagtcgtggtggctcacacctgtaatcccagcactttgggaggccaaggcaggcagatcacgaggtcaggatattgagaccatcctggctaacatggtgaaaccccatctctacaaaaaatgcaaaaaaaattagccgggcatggtggcgggcgcctggagtcccagctactcaggaggctgaggcaggagaatggcatgaacccaggaggcggagcttgcagtgagccaagatggcgccgctgcactccagcctgggcgacagagcaagactctgtctcaaaaaaaaaaaaaaaaaaaaagaaaagaaagaaatagtaacatagccccagcctaatgcatttcacaaggcagtgactcataatcatcataggaatagtaagacttcttgaaaatgtgacaaaaactatgaatccgctccccaggggtggaaatacacacacacacacacacacacacacacacacacacacccctatgcataatcacacactgttttggcatacaagcctataatttcagggaattcaggttatgaattcctacctggtataacaggatgtgagtctcatctgatttcacacactacaacaaatggttctcaagccagatggagcctgagggtgcaaccgtccttcagctgaatttgaatctgggtgccctgggtagatacagaaaaatgtggctgcttaagcctggctgagaacttctgtttcttttgttgcaggccgcttggacaccaggcccttctgtagcggtcggggcaacttcagcactgaaggatgtggctgtgtctgcgaacctggctggaaaggccccaactgctctgagcccgaatgtccaggcaactgtcaccttcgaggccggtgcattgatgggcagtgcatctgtgacgacggcttcacgggcgaggactgcagccagctggcttgccccagcgactgcaatgaccagggcaagtgcgtaaatggagtctgcatctgtttcgaaggctacgccggggctgactgcagccgtgaaatctgcccagtgccctgcagtgaggagcacggcacatgtgtagatggcttgtgtgtgtgccacgatggctttgcaggcgatgactgcaacaagcctctgtgtctcaacaattgctacaaccgtggacgatgcgtggagaatgagtgcgtgtgtgatgagggtttcacgggcgaagactgcagtgagctcatctgccccaatgactgcttcgaccggggccgctgcatcaatggcacctgctactgcgaagaaggcttcacaggtgaagactgcgggaaacccacctgcccacatgcctgccacacccagggccggtgtgaggaggggcagtgtgtatgtgatgagggctttgccggtgtggactgcagcgagaagaggtgtcctgctgactgtcacaatcgtggccgctgtgtagacgggcggtgtgagtgtgatgatggtttcactggagctgactgtggggagctcaagtgtcccaatggctgcagtggccatggccgctgtgtcaatgggcagtgtgtgtgtgatgagggctatactggggaggactgcagccagctacggtgccccaatgactgtcacagtcggggccgctgtgtcgagggcaaatgtgtatgtgagcaaggcttcaagggctatgactgcagtgacatgagctgccctaatgactgtcaccagcacggccgctgtgtgaatggcatgtgtgtttgtgatgacggctacacaggggaagactgccgggatcgccaatgccccagggactgcagcaacaggggcctctgtgtggacggacagtgcgtctgtgaggacggcttcaccggccctgactgtgcagaactctcctgtccaaatgactgccatggccagggtcgctgtgtgaatgggcagtgcgtgtgccatgaaggatttatgggcaaagactgcaaggagcaaagatgtcccagtgactgtcatggccagggccgctgcgtggacggccagtgcatctgccacgagggcttcacaggcctggactgtggccagcactcctgccccagtgactgcaacaacttaggacaatgcgtctcgggccgctgcatctgcaacgagggctacagcggagaagactgctcagagggtgagtgccagggcgcagaccagcatataatggccatgatggagtggactcctagtatgggttggaaaactacgtttatatatataaacattcatgcacactgattctttgtacgtattaatatatccatttaaacacacacccataatgactttttaagggggccctgtcattccgttgttacaaggtgacctatttaagggctgaagggctcagagaggttatataattgtcccagggacacacagctgacacatcacagagctggtattcaagtctgcctaactcatctacatagagtttaaaataaagttggagaggccagaacacatctagtgttcaagatgaggtagataaagggatactctctcttttgctaaatatcaactttatttcctactctccactgacatcaaaccaacagtaaacaaaatctctgtatttggatggatgtaaaaattcagctaaattgaatacgcagtgagattacataaaaacaactgtttcaaatgcatacttggctaaagacgaaatgcctattatctacaagattgacctgtcttttcattgtcttttgtaactggttttgtttttttgattgttttgtttttttaatcctaaagactgcaagctcctatccttaaaagggcactatttctagcagttagtatgggacctggtacatattaagtgcttagtaaaccctggttaagtgaaaacacaggagagaaaattaatgctcatatttaatgagtgtcttctttgtactcctctcatctacccatattatcattgtcataatggagaattttttcctttactaaagttattggtatctaaacataaataaatggctttgtgttcaatgtggcgcaagcagggaagcctggttggaaagaacaccaggctggcagggaggagatacaagttctaaacttgatgaggtgagcaagcttggtcaaggcgttctgtcttactcacctctataatataagaaagttggaccagatatgcccaaaataccctcccagtgctagggacacgtaactcaaagttcagagcagggagtgaggctcagactgcactttcccatgccaacagcctgcatctgagctaagacccaggaagcacagaaagttggagaggccagaaacacccaagggcacactgctgacctgggactccagcctgaaggaaatggactaaggaacagccaccacaggtcttaagatggatcacagcagggggtccctgatgccatctgcattttagaggcaacagaagatcttcagacctctgtggctgacagtggaaaagacaggtcaaacaaacctagagagattttagaggacacactgttgacaccagatgtcctttcttattcctgccagtgtctcctcccaaagacctcgttgtgacagaagtgacggaagagacggtcaacctggcctgggacaatgagatgcgggtcacagagtaccttgtcgtgtacacgcccacccacgagggtggtctggaaatgcagttccgtgtgcctggggaccagacgtccaccatcatccaggagctggagcctggtgtggagtactttatccgtgtatttgccatcctggagaacaagaagagcattcctgtcagcgccagggtggccacgtgtgagtgagcagaactcttttgggcagcctcacctgatgtcagcccacccagtgtataaccctccctcgccacggcccctacaatcctatagttgttctttacagttataccaaataagagcctagaattaagtccatagaatcacttattaaagaaatccctcattttccatcaaatctttctccttgctctcctatatacttcctgccagagaaaatcattacaagtaacatttagcaagtgtttactgtgtatcagactttgttgtaagcagtctacatattagtataagagtcctcatttggccgggcatggtggctcatgcccgtaatcctagcactttgggaggccaaagtaggtggatcacctggggtcacgagttcaagaccagcctggccagcatggcgaaaccctgtctctactaaaaatacaaaaattagtcgggcctggtggtgcatgcctgtaatcccggctactcaggaggctgaggcagagaatagcttgaaaccaggaggcagagtttgtagtgagctgagatcatgccactgtactccagcctgggtgacagattgagactctgtctcaagaaaaaaaaaaaaaaaaaagagtcctcattatatgagttagtatatgtatgaaataggagctattgttaaccccattttacagatgaggaaactgagactgcatggttaagcatcttatcccaagtcatgcagctaacaaggagtagaggcaaaactttaaccctggcagtcctggcaggtttatgttctaaaccactctattacttttcagtggagatcactgactatttttctttaagtggaaacattctggtttatgagtttagcatcagtataattaccttcatatctaaaaagcaagctctggctagaaattgacccttttttccttaataataacattggctgccatttattcaacttgttctgcatgccacgaaccaggcccagcagtctacacactggagtggagtatatcactcactcctcaatgcattcccaagaagtagacatatttaccttctttttccaagtgaagaaactcaggcttagagcactgtgtgcaattgctcaagttcacattgatagtagagcttagattctaaccccaagtctgtctgattccaaagcctgcgttcattttagatttaaacatatgaaattgccaaaattaatcataccatttttcctaatattaatttttatacagcctcatagagacctcatcccagaagaagctttaaaaggacacctgctctggttgtcagcccctgactgttgcagacatccagtctggtttagtggaatcgtggccgcgttgcccaatcacacacctgccctatccttacgttctatttatgttgttacttacagacttacctgcacctgaaggcctgaaattcaagtccatcaaggagacatctgtggaagtggagtgggatcctctagacattgcttttgaaacctgggagatcatcttccggaatatggtaaggagtacaaaagagcagatccatttgatctcaaggatttgaaagatgaccaaagggttctgaagacttctgtatcaactaattttccttagtttttggtggaggacaaggctctcattagcatcatttgtgtttgcatctatattttaagggatgttggtttttccctgattttaataagtaagtgtagcacttacggctgacaccctagacaaatagaagttgtcacctcaaggttccaattgtccatcatcaccttagaaatctctactcagaggcaaagaagagaagaaacagtctctccctcaaaataaaggtacatctcagatttgagcaacccttctctccaggcccaaaagtacatgtgaagcagggaacttgttctctgaatttaagcccaggctctgccaccaaccagctgtgtgactatccaacaatcaccctactcctctgatgctggcctcagtctacccaaggagggattgagcttgtgccttcagaattcctttggctctcacattctgtcatttgacttgcatgacaaaggggtaaaagtttacgaatgggagaaacaaactagagaaatgtctttatcatctctgtatcctcagtagcttacatactgatctgatgcatagtaagtgcctaatgaatcgatgaaagaataacagaggaatgaatgaatgcagagtgaatgaatcacataaattaagagactggcacctcccctaactcttaccaagctgcctctatctctcagaataaagaagatgagggagagatcaccaaaagcctgaggaggccagagacctcttaccggcaaactggtctagctcctgggcaagagtatgagatatctctgcacatagtgaaaaacaatacccggggccctggcctgaagagggtgaccaccacacgtgagtatcacctttaatacttatagaatgataaggctgattgtacctcatagcacctcctggttgagaaagtgccttctcatatagcatctacatcatttaacttttgctgcatttttaaaaatccagatacagtggtttaaaataacaattctttgcatgttggtgatttgggtttgggctcagctgagcagcttatctgttcttgactgcactcctcatgtatctgtgtgcttaaggggtggattggcctaggatggcctcagccaggatggtgtctttctgtttcgcagagcctctcattctccaggatgctggtcctgttcacacagctattgaacaggttcaaaattggcattagatcacttctatcaaagcacatcccacggccagtttatatttaaggaatagagaaacagatccatctcttgatgaaaggagtttcaaaatctcctttcaaaggggtgtgactacctgaagataattaagcccattgctaacaatctaattagcatcatgtcactagtttaatattagcacccagttgtaggacagaggaagggaaaatattaatgttaaggcttaaagaagctaaatcactttaacatcccatagttaacaccatcaggggcataactttaagccagggtaagttttataactttaaccccatttccactaacattgactaggctctggtttatgtagaatgttgattccatctcttcaatgggaacctaaataaaatttcattcaatactaatgatgtcagaagttcttgggagtagaataggatttagcagtactagatcatttggtgagaaaaagacctgaatttggagttgctccaccaggaaacattttttttttttttttctgtcacccaggctggagtgcagtggaacgatctcagttcactgcaatctctgcctcccaggttcaagtgattctcctgccttagtctcccaagtagctgggattacaggctcccaccaccacatctggctaatttttttgtattttagtagagatggggtttcagcatgttggccaggctggtttccaactcctgacctcaagtgatccacccgcctcggcctcctaaagtgctaggattacaggcgtgagccaccgtgcacagctgcaattttttaaaaagaaaaaaatgcataattttgcacttccatataggaaaacctctttattttcttcaagataacatatgcgccaactctttaagtaatcgactcttcttggcagggggttgttggaaaaattaaatcagttgctaatgacaagaaagaacatcttgcatttaaatatttgcacattttgcctagctcagagccaattcaaaggattttctctttcataagcaagtgttttccatcatcctgacaccacctctctgtggtaggtagaaaagcaggtaccaacaggaaaaaaaaatcattagatcaccagaaagacaaagaaaagacaaagcaaatgcttagttgctatggaggaggtgcactgaactttttttttcactgctcttttgtttatctaaatttgggaattgtctgctttatttcttcttattttagaacaaacattccaacatttgaagttgcataatcataaatttcaacatagggggacaaatatttacctgttcattttgtatttttagtagagacaggatttcaccatgttggccaggctggttttgaactcctgatctcaagtgatccacccgcctcggcctcctaaggtgctggcattacaggcatgagccgccacggccggccacaatttaccacatatacctgaaacctttaaacctttaaccttttttccagatgtaaagggccttaaacttctagttcagaacacatttggctccttctgtctggcatctatataaaggtggtattatacttacttttgaggtcaatatgtttgagaggtgttgtcatgtaaagggggaaaaggatgggctttggattcaatcagttctgagtttgaattccatctttaccattcaccatcaccttggaaaaatctatttctttaagctccagatccaacagctgaaaaatgggtttatagtattctccttgtggggtcgtcataagactcaagacataaataacaaagcaccatctttgcacctgataaatacagagcattgttagtttctgctattcaagggtcccaaatctagggggatatcagtgtccttgacggaaacccaacttctttaatgcaaggggtactaaggaaggtagtaggtacggtttgggtgcttgctagcacctataagaacacagagcaggcagcttctgtccatttttgcgacatcattttcattgtgcattttacatcatctgtgagctgggactgatgtgtcaacacctagacttcaaaaacagactctgcagttttctcacaatctgctgtaaattattgttccttttcattccctgtataaagcccacttcctgtcacttgttattgtttactgaaccaatgctgaaaacacatttaaaaaaaaaaaaaggagaagaagaagaaagaaagattcaaagattcactgaatacccagaatatgcctgtctctgctgggaatttaaaagactcactctctcaatcaatgaataaccctacctaaattgactcaaactgtacagaaatctgttatgaaacaatgagacacgtatgatattagaatgctcttcaaggacagtggcagccacagggagggaatatgtgtttacctgactgaagccgggttaaaaaaaggcttctcattaggagacaacatttaagtgggattttgaaggatgcataggagatttttagagggaagtatgatcttagaaagaagaaatgagagaacagcatgtacagagaccaggcggtgcccaacagcataatgtgcttccagagctctgagcatctatcagagtacaacaccagagtaggtggggcagaaaaagtcaagatgagcctgcaaaaacaggcaaggcttgaaatagcaatgactttcttgcgtgaattctttctatcaaaaataagtttccatacactgtcaagacagtctattgcctcacttttctgcttggtaattctgatggaaaagttttcaggaaacatccaggaagttttgcctaattaaaaatttaaagagactaagttcatcttttcaaataaagtatccccaaagcatgtttcctcaacttatgagaacagtaataataataataataacaaaagaacaacctttttttttttcatgtgacatccatgggccagtctctgtgctagatgctttgcaagctttatctctcttaagatttgaaaaaaacaaaaacaaaaaacactagaggtagctgctgttatccctacttatagcttatcaaaccaaaaactaaggttcagaaaggcaaagtaaagtcaagcagttagtataagtattcacccacaggtctggagagttacaaagtcctctctctgctaagcctcaggcaatggccctaacctctgaagcctctctgtcctctgcccatcataggcttggatgcccccagccagatcgaggtgaaagatgtcacagacaccactgccttgatcacctggttcaagcccctggctgagatcgatggcattgagctgacctacggcatcaaagacgtgccaggagaccgtaccaccatcgatctcacagaggacgagaaccagtactccatcgggaacctgaagcctgacactgagtacgaggtgtccctcatctcccgcagaggtgacatgtcaagcaacccagccaaagagaccttcacaacaggtaaaaggcctccccctgttaacagatatagtaaaggaaagattgaaagatttccatcccactccatgttggggtatcttccaggctcattttacagtacgaaaaatgaaaggggtatttctactcctgtaaattttaaaatattgtagcaatttattaattaatttttcaaaaaaaattccaaataaccttccaaagcacttttgggggtgggggacatatgtagaagatgctggtctgatattctcagacaaaagttctggttaaaataaagttcaaataaatatttttaaagtaaaatatggtatatggaaaacatatatgacaaatgagcctcctaacactttagcctacggcattattttaaaagttcaaaagtgtcaatttttcattcagtaaatatttttcagagctcagtaagtactttgtgagttattagaaatatgatgaggaggccgggcgtggtggctcacgcctgtaatcccagcacttggcaggctgatgcaggcagatcatgaggtcaagagatggagaccatcctggccaacatggcaaaaccctgtctctactaaaagtacaaaaattggggtcaggcgcagtggctcacgcctgtaatcccagcactttgggaggccaaggcgggcgaatcacgaggtcaggagattgagaccattctggctaacacagtgaaaccccgtctctactaaaaatacaaaaaaaattagccaggcgtggtggcgggtgcctgtagtcccagctacaggctgaggcaggagaatggcatgaacccaggaggtggagcttgcagtgagccgagatcgcaccactgcattccaacctgggtgaagagcgagactccgtctcaaaaaaataaataaataactgggcgtggtggtgtgctcctgcaatcccaggtactcgggaggctgaggcaggagaatcacttgaacctgggaagcaggggttgcagtgagccgagatcgcaccaacacactccagcctggtgacagagcgagactcttgtctcaaaaaaataaaataaagaatgaaatatgatgagaaaatgcaaaagaccagtttttacactcatgagcttatttttaagtctttgcattgtttctttaaccacaaagtctgagaaaaacacaaatgactaaagtgtcgcactcatccataatagggaaaggtgccaaatctgtagcacttgtttagatttgcacatccactatggggacagatgagtgtgctgagaattttgtaatttctctccagttccaggcacgtttcatatgtcagcttgagctgtcaaagactcctgctctcttgtgactgatatgttcaatacaaatgttccttctctcaaacaggcctcgatgctcccaggaatcttcgacgtgtttcccagacagataacagcatcaccctggaatggaggaatggcaaggcagctattgacagttacagaattaagtatgcccccatctctggaggggaccacgctgaggttgatgttccaaagagccaacaagccacaaccaaaaccacactcacaggtgagctctgcatctctgcaagcctgagccagccagccctagagggcccttaaaggatgggcacctgctcccacatgtccccatttgcaaccctcagaaataagtccaatttcctgaaatactgcttattggattgcagtgagttcttttgtaaaacattccgaaaatttgttgtagcctccagagaccaactcaaagccatttttatcatcctctgaaagtctctctgatttcaggatgaatctcaacttgcacattctctccttaggtctgaggccgggaactgaatatgggattggagtttctgctgtgaaggaagacaaggagagcaatccagcgaccatcaacgcagccacaggtggggcacacctggaattcccatcccactgagctggtgctgggcagatgagacagagtcaatgtggccaaaacctatttaaagagaaaaagtagaagcctggaggaaaaagggccctgtagtaccatctagccccaatgttgaaattcaaaaggaacataagtacggtccatctgtatgatgccaacatcatcccctgtatggaaaaggggactggggattttgtgtttgttgttgttgttgttgttgagatggagtatcgctctgccaccaggctggagtgtagtggcatgatctcagctcactgcaacctccgcctccagggttcaagagattctcctgcctcagcctcccgagtagctgggactacaggtgcataccaccacgcccagctaatttttgtatttttagtagaaatggggtttcaccatgttggccaggatggtctcaatctcttgacctcatgatccgcccacctcggcctcccaaagtgctgggattacaggtgtgagtcactatgtccagccgggattttttaaagaaaaattggaaccaggctttgtaagaaattcatgaacatgtgtaagttggtaatcagttgcatcttttaaataaaccattatctagtccaaacacaactgtggggttttctctgagaaaacacctaacttttatacccctgtcaagcagattataagtaacaggattgtagtttaagtccaggccctgcacttacctgttgtatcctgtagccgcagcttgtaggtgaggatgctgaggggctacctgatttgaggtcattgattctttcctcaagatttttttttccatttttctgggaagtttgcactgcaaaaagaaaactcctcctctgcctctcccccagcccccagcttacctccccacaggcactatgaggaagaaggaggctagtgtgtaaagaggagatggatcatcattgagcttccacattatgcgggatgcaaggccggacatttacatgccaattctttttttttaatcttttgattttgagataattgtagattcacatgcaattgtgagaaagcatacagacagatcccctgtgcccatcacccaggttcccccaagggtagcgtcttgcataaatgtagactaatataacaactgagaaattgacattggcgtaatctgtccactctatttatatttcaccagttttgcatacactcattcgtatgtgtgtgtatatacttagttctatgcaattttatcacacatgtagatttgtgaatgcaccactagagtcaagatacagaacagtcttactacaagaatcccacatgctaccctttgcagccacagccacctccctccctttgcccctctgcctaaccctgggcattcatttatctgttcttcatctctatgattttgccatttcaaggaatgctgcataaatgggatcctacacatattagtccatttgagttactgtaacaagaataagaataccttagaccaagtaacttataaacagaagaaatttatttctcacagttctgaaggctgcgaagtccaagatcaagatgccagcagatttggtgtctgatgaaggcctgctttctggctgacagcaggccatctttttactgtgtcctcacaggacagaaggggcaaggtctcttttataagggcaccactcccattcatgaggcctcccaaaggtccctagatccaaatgtcttcacattggggattaggtttcaacataagaactttagagaggcacagacattcagtgcatagcaatacagcatgtaacattttgaaactggctttttttccttcagcataattctctcgagattcatctaaattgcttcttttatcaatagttggttccttttaactgctttaaatctgagcagcattttatggaatggatattccatgacattattttcaatcttctcagactccgatggggtcatgtgggtgatgtataattagacctattttacaaaagtaaaaagagagacccagagatgtgactctcctgtggtccctcagctcctctgtggcagacctaggattccagcccagatgcagttgactttcagccccagaagcagccctgtcttgcagcctgaagagcattcatctctctgttctcctcccagagttggacacgcccaaggaccttcaggtttctgaaactgcagagaccagcctgaccctgctctggaagacaccgttggccaaatttgaccgctaccgcctcaattacagtctccccacaggccagtgggtgggagtgcagcttccaagaaacaccacttcctatgtcctgagaggcctggaaccaggacaggagtacaatgtcctcctgacagccgagaaaggcagacacaagagcaagcccgcacgtgtgaaggcatccactggtgagtctgccctgagcttcctccaaactctaggttgattctgaggttagcagatctcctcagccagggtgtcctcacatgagaaagccaaatgcaaaagcaagccactttctccatctctgaagcccctgaacaccactttgaaagggctgcttactcgtcttttctacctcctgtcaactgatacagcaaatttcccccactgggaaataggggttttaaaatatttcttcctaggagaactttaaacatcagggtttgtgtttgcatttacctatgatttttgttttcttttcttaactgtgcatcacagcatcttttcaattgtttcttgtttatttccttcttttagcctaataattaatttacttttcattttacttcatttaaagatgaccaagatgttggtaataatattttttttgttgttgttattttctacaaactgtttttattccaggtcttttgctttctgccaaggttacccctgaagagtggcacacggccctttgagacttccatggtgccctctcattttctcttttctcttagtcattaagacattaacctagtttgtctatgacgacagcttaatcctgacattgtggcccatgcaacttgtgtccattctggcccatgcaacctgttcactgaacctgaggccatggttactcggtggctaaactgaagagacaaccaggtttttaaaatatttcttcctttatgaaaaataagcctattcaattttggccaccaaatattcgaaatgtataggtggaaaatgttacttttccagggtttggcaagtaatagtctttacttccaatttaattagtaagcatgtattgagtacctactgcatacattgtaccgtactgatatttgaggaaaagtagttcccaaagtcagcattgttatgtggactcatttgtgcctgctcatagtgcttgcggaagactagatactcagaatgctagacagaactcgagaaaaagagtgatccaaggaaatcaggagagctggcaaaggtgttatggcaagggatgttattccagttgaagcttgatatgcaagaaaagggttagaagtgtggacatatttggaaatggcttgaagagtctttctcacaatatcttcagtctcaaatcacagtcacttacttaagatagaagttggttttctttcttataaaatgaatctggagctgggaggtacagggataacttagtagtttcaaattgtcaggcacccaggctgcttctttcttttccaccatttttagtccttggcttccattctcaaagtcatctcagtgtcacaacatggctgctgtaatacagccattccatctgtgttctaggcagcataagggaggaagaaccaaaactcccaaagaggagcaccttctgggtgagtctttctggaaaccccaccaatcacttctccccatagttcattggccactcctagctgtaagggaggcagggaaaggtagtcttctgtctgaacatgttacttccacataaaattgaggtcatttgtaagagagaaatttggcagacaatgagcagtccctgccagagtctgaaatgagtttacgtggtcaattctgttgactctgcattgactgcttcccacccaactataagatgtttataaaggatgctctgaaagaatagtttaattaaaaaataaggtggggggcggggatagaaccaagaagaaataaatctatagtagagatttaaatttcagctttataaacatgagcttgttataaagtgtcaaggggcaacaaatgaatcagaaatgcccaaaagatgaaatccctctcttttctttctctttctctctctttcttccctcttccctcactcctgctcttcttcctcctcctccttcctctgcccctctcccttagctttcccttgagtttgataaatgctgtatctaagagagattcctattgcccctcaatcattccaccttctggtgatggccacattgcctccttcctccagtgagaaaacctcacacctgcgcagtcactgaagaagttttatctccctaagatcctgaggtgtggggcttctccactagagaaaggaggtaatgtggctataaccaggagatttactagctagaattattctgtttctgaatgagagccccatattggcattccaaagcctcagcagttgcatttccccaccacgcctccttaatgccatttcaaagatatcatgtttcgtatttaaagacattcttcagtgtgggaaaaatgtgcaaagttctttttattggttcttctccactgtccacagactatttcccccatccctttctccacaggaaaaaatatatatgtttcatttaaggtgaagcagacgcttctttccctccttgaattctaacttttaaagccttctgcattcactcagtcaataaaatactatcaccatgctctgtgctaagttctggggttactagagcaaagaagacgggtatttaattccaaggaactcactgtgtagcgaacaaacagacactgagataacattctgctcactacgatcgagggtacagagggtgcagccagtgctcaggagacactggatctaacttcagagaatcaggaaaggcttacaatgggaagacgcttttggacagagacataagaggcaaacatagatgtgttaaatggaatagctaaagaagtagaagcccaggcacctgaccttggtaagcatagaggaagaaagaaaacaggaaaagcgagagctcttgggtgaaggagccatgtggctataagtcctgaaatgttgcagagttttaggttcaaccatcagaagcaagaaccttccagctctgtatcactggattcttaatagcagaagcctgccaggcgccactcaatgtctgtggggcttacagagaaaaatgaagaatcagtggccctgaagaatttttcctggggaattccagggttttactgatggattgggccataatgtaagtctttttcttgatgtggcaccatactaaaaatatgcataacctggccacctatcacacctctcgcccaaagacccagccatgggttacagggccctacagaatctggcacggccagcccatcctctgacctcagtcctgccactcattcccttgctcacttcaccatggcctcttgggccttcacactgttccttaagctttctgagcctgctcccaccctcgggctttggagtgtgctgctcccactccctggataccactcttttcccagcacttcacagagcgtgctccctcatttcactcagcagctcagatatgacccagaacagagggcttctctgactaccagcctaaaaaggcacccccatcctgatctaccccttcaagctgctctaggtttccttgtgaaacttatctgccttgatattatgcaagtattggtttactataatatctatggcctgcctccccatcagtgagcagaatataaggactgattccatcatccactgctgaatcccagtgccctgaaggcagacaagtatgtggtatgagcttcatgagtgtttagggaccctggctacttcagagtcagcatttccatagaatcttctgattcttcccttccacctctgcattaacaccccaattctttccttaaggcataagggaaatcattcccttggaaagtcttcaattccgcttaatctggatagaaaaggaaggaaggaaggaaagaaggaaggaagggaggaaggaagggagggagggagggaggaagggaggaaggaaggaaggaaggaaggaagggagggagggagggagggagggagggagggagggagggaggaagggaggaaggaaggaaggaaggaagggagggagggagggagggagggagggagggagggaggaagggagggagggagggagggagggaggaagggagggagggagggagggagagagggagggagggagggaggaagggaaggaaagaagggaggagggaagaacgaaaggtaccgtgtctgttggcatttaaaaaaattagtgtgtaccaggcatcattccctctcctcctctcccattccctcccttctctttccctctcctccactctattctcctcccctctccttcctctcttctcccctcttctctctcctctcctctctctcccttttctctctgcttttgtactcttataaacccaactaaaccctgcttaaggtcaaagccatgaatttgctgcatgccataagagacaggaggcaggggtgataggcagaaacataaagccagcaaagcatattttcatagcaacataagccttgacagtgacaacccagtagctctcaggaattttggaagaagaaaggtggaattttgtttttagccacagctaccagtaatacagaacattctgctcttatttgctattttgattttctcacagaccaaactgaaatttattcaaatatttattcatccagcaaatatttatttcatacctactgtgggtcaggcgatgccggtgtatagaagagaaagaaacagcttctcttctcaagaaatggtgcacgttgctataagagagagaaccaaaacccaaattataacactgtagcttatctgttttagagggatttgtgggaggctgcaggagcatacagacaggtacccatcacagacctaagcaaagggaatgaaaagcactggagaaggctttttggaagaagtgatgtttggttgagttctgaaaaagaaaaggggctgggcaagtggagaaagagtaatgacatttccagcaaagggaatagcatctgaaaagctgaaaagcatgagaaactttaccttagtgaactgcaagctatacagtcctgctatatgatagagtgggaaaacagtagggtaggaggctagagacatcatcaggggcatctgcaaaggggcttggttcttggcagttacaaagaaatcaccgaatgttttaaggcagccaaggcttctcatttcaattgtcttatctctgagagatgagagtaaagcgactgaagataccctttggggttgtcaggcttggatgtgaccatgcccctgctgtgggagaatcactctttctcccctaagtggacgctgaagtgagttcctcatcaagccagcacttggtaatcactatctagaagatggtaacaatctacagatttttaagttggcactgtcagaaattcctccagaccagctgctcaacccaccaggagcacagcaatgggtttcaaaattctgatttcccaggcccactgacattgttcaagggtagattccagtgcacagctgtaagaagaagacaacagccttttgataaagaaatgccaagaaattcagtgtggaatctataatggaaacacttggcttctagggcagtaagtccacagtatgtcatttgcagttgaaatgtggagccagcatttatgtgaagcctcttggtcctcatctcaactattgtccactgtattttttattcataatattcccccttctttcataattctgaccccctctctctttaatttagctactgattttatttgtggaagttgtaccttttactcacttggctagcatttatttaataaagggatctggatggggcacacgtagcatccactactgacatggccacagtactgcctctctgagttataaaccaatgctctttcttgatttgcctaccaaaaaaaaaaaatagtagagaaatagccaaaagtgttagcagaagtaccaacaccatcactattactatttactgaacaacatgacattatgtaaaaaaaaaatcactctatcaactatatgaacagatgaaacaggatgtggggacaattagatgaaagtatcagtggcatactaaatatccgattcaaagagataagatgattctcattaggaagagacattttccaacgtgcatcttttctctccatccatcttttgccacagcttaatgggcaatccacaatctcattcccccaccccccgtaaggtaactttcccaatatctctttcaagggggcatttaaaatttattttatagaaaaaaatgttttatgtaacaattagacataaggattaaaagatagacacccgtagaaaaaagacagtaacttaattcacacgaaggggtacgttgtcaatgacagattagttcctgacaggtggacagcagagaaacaaaaacaggaaagtgggataagaaggagagctaagaagacatagggttgatttaattttcacttagctctgtttttgtcctatatctctttctgtatcaggactgctgaaatatttgagaaggacatgctcttgagtttagttgtgcttaaatcccaatgtcaagggtataatcactatatccagggaactgtttctggcctcacaaggcccagcaggattaaaggtagttgacacctcctttcttttcctaaatctagatacatcacttgcagtttggggtcctccctttctcataaagaccatgtttaggtggttaagaactgctttggagcctctggtgtaagctttaggatatgagtcggggttaaagaggagtctgtattcaagatcaagtattgcaaacattttctgtaaagggccagatggtaaatattttagactttataggccagagagtttccattacaattattcaactgcacattttgtaacacaaaagcagccatcaacaatatataagtgaacaagcatggctatgctccaataaaactttatctgtggcaccagaattggaattttatatgacttgcatgcaccatgaaataatattcttctttggatttatttcccgaccatgtaaaaaagtaagaaaaactgttgttagcttgctgactaccaaaataagcagctggccagatgtgggcctcgggtaacagtttgcggacctctgttctcgatcaaacaaaatttgaaggagtgtatgctctgacaatatgaaacaagcaggaagaatgttccccagaacttagaaatgtctgagttaaatcaattccagaaaagaaatgttttctcctctgaaaggatatcctcaatcaaattccaagctaagattttcaacttagtagcctgctctaatggacacataaggctcatttgaaattagcagcaatgtgaagtataaatagaaaaaaacagtttgttcttttaaatgatttaaagtcagtttctactctctagtttacaggatccatttccagagaaatactttccttcctaaactatgcaaagtccacttaagctcagccctgggcaaattatctcccttaagtcaggttgagaccagtgagtttttacggaatttcgtgcattcgcgagatgaatgaacagggtgcattcagttttacttgagcttcataagatctgcttctcccaggacctctttcttttttctattaaggaacagtttttcaaagccttatcaccttccttagctcagccttaataatactgtgtcaatgtgtctctgatctttactaatatgatctatgtaaatgatttgaacgctagaaactgatgaaatcccaatataaactatacaacagacctcccataggatattgaggcagcacaaaaaagaagaggctttttttttttttttttttttttgagatggagtctcgttctgtcacccaggctagagtgcaatgactcaatcttggctcactgcaacctcaacctccagggctcaagcgattctcctaactcagcctcccaagtagctgggattacaggctcacgccaccacacccagctaatttctgtattttttgtagacacggggtttcgccatgttgtccaggctggtcttgaactgctgacctcatatgatctgcccaccttggcctctcaaaaaagaagggtatctaagaagagccaattgtctcaaaatacagaaggtcggacagctcaaaccaagacccccagaataactgagggccaccccattatgatgcaagacatgttccaaaatgaaaactgaagctcagagcatcgctaacatagacatatagttttctaaatctgcaggacactgatcaataggaaaataccatttccaagagaaaaacccaaatatgcatgaaggcaaaagaaattttttgtttgtttgttttgagacagagtctcactctatcccccagactggagtgcaatggcgccatctcagctcactgcaacctccaccttctgtgttcaagcgattctcctgcctcagcctcctgagtagctgggattacaggtgcccaccaacacgcctggctaatttttgtatttttagtagagacagggtttcaccatgttggccaggctggtctcgaacccctgacctcaaatgatccacccaccttggcctcccaaagcgctgggattacaggctcgagccaccatgcccggccacaaaagaaatatgacattgttgtcctgctggtgttttaatagggacagcaccagtaggggatgcagtgaacaaagcctggcacttggactgcaatggcctatagatgtggcattgggtttgccattcccaggttctcagaagcaaaactttctgaggaatagtttaactgaccccatctctgtcattattcagaacaagcccctgagctggaaaacctcaccgtgactgaggttggctgggatggcctcagactcaactggaccgcagctgaccaggcctatgagcactttatcattcaggtgcaggaggccaacaaggtggaggcagctcggaacctcaccgtgcctggcagccttcgggctgtggacataccgggcctcaaggctgctacgccttatacagtctccatctatggggtgatccagggctatagaacaccagtgctctctgctgaggcctccacaggtatctctttcctttctatttatagcttctgtttttcccagcaggaaactgcccatgaataatcagacacgactagctttggaatggacttgttctgccactacttatgtctatggggtctaattgtgacacgaggccatcacgctacagaaccccaaggcaacttttaatacttcactccacatgaatgacacccttgggagttgtacagagctcaacctgcaggactaaacacacagctcccatgcagagggcctttagctccataaacagcctccctcctgttaaaggacgttaaggcactatatatgaaagggaaagaaaatcacaaaattctctcatctactgagggttaaggcaattctttaagatttaaaaaacaaacaaaaacaaatattttcctgcactttcctctctttgctccatttctaaaatttaaagagttgcatgatgcatgtttatctaaagaaagtcacattttttcagtaatattattattcagcttattcttgtgttaaagattccctggatcttgttgtgtgatttgatcactaaactagttctttgtccttctccaggggaaactcccaatttgggagaggtcgtggtggccgaggtgggctgggatgccctcaaactcaactggactgctccagaaggggcctatgagtactttttcattcaggtgcaggaggctgacacagtagaggcagcccagaacctcaccgtcccaggaggactgaggtccacagacctgcctgggctcaaagcagccactcattataccatcaccatccgcggggtcactcaggacttcagcacaacccctctctctgttgaagtcttgacaggtattctagacgaattcactaattcacttcctcccctttgtctctgctcgggaggaatcaaagcactttcttgctttaaactgggatcagctcctaccacattggggaaataccagtgaatcatctctgcttcttcctaaatgtcacatcccttatttggctaagtcctagttgtagcccagttccatggaaaattccacctactcctcctttaaaaaagtgagaggtggcttttctttcaaagtaagtttcagtcacaatatctaaaaagttggaaagcccaacctgtaaatgaagaaaaaatagctctgagctcatgagctcattttaagaacaccaaaggactccccatagccctatttgtatgtcaagaatagaaattgtgaacaattcctaaaactacttttcattcccaaaagctgaatagaaaaaccctggctttagtgccaacagtttgagtgtgctcaacacctgctgtaaatcatgcatctataatcaacactaaccagacaactcatcccaaccttagccaaaatgccatctcacctgaatcccagcgtgcaattgcctttttaagtaactcagcaactctgtgtccttatgcagaggaggttccagatatgggaaacctcacagtgaccgaggttagctgggatgctctcagactgaactggaccacgccagatggaacctatgaccagtttactattcaggtccaggaggctgaccaggtggaagaggctcacaatctcacggttcctggcagcctgcgttccatggaaatcccaggcctcagggctggcactccttacacagtcaccctgcacggcgaggtcaggggccacagcactcgaccccttgctgtagaggtcgtcacaggtatatgaccctcctcccagactggagacatgataggagccagcatgtcattgaaatagagaaaattcacccgtgtggcagaatcctaccccaatgttgttgacagacagcgtgaatctctaactcaggaaggtctgtgttggaattccacctcactagctaaatattcttgggactatatgtgtatgtatatatatagatacacatatatacacacacacaaatatatacttatatatatagtgtgtgtgtgtatatatatatatgtgtgtgtgtatatatagatatatacttttttttttttttttgagtcagggtctcattcttttgcccaggctagaatgcaatggtgtgaccatggctcactgcagcctcgaactcctagactcaagtgattctcctgcctcagcctctacagtagctggaaccacaggtgtgagccaccacactcagctaagttttttgtattttttgtagagatggagtttcaccattttgcccagcctggtctcaaactcccgggctcaagccatcttctcaccttggcctcccaaagtgctgggattacaggcatgagccagcgtgccctacctctattcttgggtatatttctttacatccctgagcctcctttttgtatctttaaatcagcaatgaaccctacttcaggaaactgtcgtgagcaataaataagttaatgaatgtcagtgcttagtaaagcgcccatcacgtagtaaatactgaatagcaaatagctaaatttatcatacagcaacagagtcatgatttttaaaatagcacaaacgttagggctgtggcacaaaaataagatcagaactttctagaaaaaccttattactagcctcagagccaccaactaacacccacctgataggcagatctctacataataacctttagaaatgatgcagttagcttctgctgaaactatctaggactctctcctcaacagatacaaaaagcagggacatttccaagaaaggacagccacctttgacttcaatgcttttcattcaatttgggaaggaaaaacaattcctctcaattttccaccaaaaatgagctgctccatctgttataaaaaactgtgctgtacatgagatttctagaaatagcttcaaaaagggctatgggaaaaagggccaactttttggtgatagggtttctgtgctgagccctaagcccatgccccactctacatatgctgccttttgataatgcaatccaaatcactcaattcaaaacaattgttttccttgctcttatataacagataaacttggtggttgctagaaactacataaaattccaaaaataagggggccaggttttattcctgtgttgcctggaatatcttcagatcaaacaagagcaaaaagggcctttgagacaggtgtggtctgtgtgcaagatgctcatatcttcctctgtagtccgcaaacttttgtttttagcagtacaactccttttgcaaatgaaatcttccaaggaaccctactatttgacagataagtgaacagctgttcttggtgtgcctggaagtaagagggggatacctccacccatgttctcaacacagttcttctagaaaagccccagatctatgtggaacacagtttgaaaataacccctcttaaaagcaagaggttgctcagaggttgctcagactctcacagggcattgaatccttggatacccaagagcaagtatctatatctttcaactatttttggttgaaatccctgcagatattctcctccctaacttctaacccatggccacttcagccttcaaaacagtggctgagagactgcatttaaccctcagaagcatcccacaaaacaatgggtttttccatatcctaaatccaaactttctaaatcaccaataacaactacgttaaatttcctttctacattgtagaagcagtaatagtgggttctgttctgcaccatttactgagaaaaatctcctttcttttaattaaaagtaggcacactcatttcacacaaacagctttgctctgtgatacagccattcttcctttagacataaagtacgagcagaaaaaggtggaagaagaaacaagctgagaacccagtacacaacttttgatccctgaaagctgatagaagaccaaagaaaaaacatcatacttgttcacacctgagacagcatacactttatcaacccaggcaggtagccagtggctagtgatgagataatctttctaattataaataatgaaataaagcagggatttctccctgacatgagtaagaaattccaagggaaaacacttgaacaatgatttctttattaagctgacacttattgggcactcgccatgtatcaggtatgatactaagaagttgataaatattaccatttaatcatcacgcaatcccatgaaacagtaccatcaactccatttaaaggtaaagagagggtggctcagagagaagctgagtgacatgcccaagattatgcagctagcaaatgctagtattgggattctaatcaaggactacttgcctccaaattctgcacttgtaaccattgctgtatctcttaccctaacccacaatcctacttttccatgtgaatttcacctgctagcaatgcatgctcccggtgggttgtgcattggtgcagatgtctttgccatctcaaggataaaccatgtagatatttccctttctggccattttcaactcctgaagacaactgtggccagggaaccacagttcaaattgcaaatgctcagagaccaagaattaaaaaaaaaaattatctttcccctttctctctttcctagagttgggctgtgggatgtttggtttcctcatttttggtttatagaactgacaaatacttttctgtccttcttcagaggatctcccacagctgggagatttagccgtgtctgaggttggctgggatggcctcagactcaactggaccgcagctgacaatgcctatgagcactttgtcattcaggtgcaggaggtcaacaaagtggaggcagcccagaacctcacgttgcctggcagcctcagggctgtggacatcccgggcctcgaggctgccacgccttatagagtctccatctatggggtgatccggggctatagaacaccagtactctctgctgaggcctccacaggtacttcctctccctgtcaatgctttctccccaaggttctttgcttccttttcaagagatcatgcgcggagtcagcatctcgccataactgaatccttttcatgtgcctttcagtggccggctgtgcatgctcagagacctccctgtgggctatgactttgtcctcatgcctttgccatgtggatggtgaatgatgcaggtgttgccctttctgatctccagccccccagcctttcatactttacctggctgattctacatcttttttgaatgatgaatttttgtttcaggaatcagcctgatggttttaattcacttctccagtgcttggagataactaaaagcttccctccctatatatgagttctggtggaacacagattatttacttctgagagtcttttgctagttggaaatggtgcttttctatctctaaatccctcaaggatatgggtagtgtggttcttgcatgtaagaaatgtttctttaaaatgcacccagtataataagagaactgaattaccctcctccgggcagttctctcagatactgagtcattgttagaacatcaaattagcaaatagctagaccagaaggaaaaaaaaagaaattacacaattatgactggagactgtaccaaagagaaagccattcattagcacaagtacacacagcagcttttggaacaaggaatgtcctgggctatgaatgtcaaagaactgataccctttttgctcttttaatcaagagtttctctctggagtgttggcctttggatggcaaactcccagccccagacccaggagggtgcattatagtttactcgtcactctacccctgttacaagacttcagtgtttcccgggggcctgccaaagtcagcagccttcctctgacacagttttccgttgctcatctttattatgtgcctccatgggtttgaagctcggtagagactatcgcttcattttgcatatgactgctcccctttttaaataattattgcaactaaactttaatgcatacctgtacatcccagttgaatctagcaagagcatagctctgcattttaacctcagtcatttcactaattttcactgagataaagaaacataaagcacaggcaaccactgccaggacggtgaccctgaaatgcctagaatttgcagccgaggctactctgaaggcacccggacctcctttttctgagacccataaaccatcccttcccagaaggcaaagtaatcacccaccacttctgatcttttctgcagatcttgtggcttgggtgtcctcagtatttttatgtgtgtgtgtttttcttcttaacaatagcaacattcttgccactgatgaattggcctatgggcaggaagttccataatcccatctgatctgtatctcaacaaatctattagaaggatctcagagaccaggagccttctttcttgctaaagagacagtactagcttttcaaaccctgctcctacctgccctctgcatgttttattcttatggttggggaaagcactggcaggaccatcttcaagacaaaatgttatttcttcgctgaaagggatggcctaaactgccttgccttggcttagccctcttggttggcaatgcaatactagcctttttggcccacatagcagcagttaagagaggacaagctattttaacagaatatgagaatggctggctggtccttctctaaagtatgaaaaaaataccaagaattacactgagaaattggtaattaccattaagtcacaaaatcagaagcctcaagttaccaccttgggaaggtaatggcatcagaattatttagccctcatttgaatagatgggagctccttcaaagtaaagaatgtctgtggaaggcatccaagtaatcttggtttccttaatgcaattcaagagactggaagttgccaggactcatatcttttgaccagtggccagcaaccctgaggtagggctcccagaggcaagtgtggttaagatgcaacagttcctgataagatcattcagcacatcttcttggccagggcctgattatatgtggcaactgcatgtagagaaatctaattgccataccttcctttttctaatttcttttaacaaaactgctttttctctccctttggcactaattggtaacattgcttccttccatcatagccctgaattatcagatctctctacccagcaatggttctattaacaacctcaatcttaaaacacagccaaataattaactcaaatttatttttttcttctcccctaccccttccttttacagccaaagaacctgaaattggaaacttaaatgtttctgacataactcccgagagcttcaatctctcctggatggctaccgatgggatcttcgagacctttaccattgaaattattgattccaataggttgctggagactgtggaatataatatctctggtgctgaacgaactgcccatatctcagggctaccccctagtactgattttattgtctacctctctggacttgctcccagcatccggaccaaaaccatcagtgccacagccacgacaggtacatgtgcattctcccatttctaacgcactctctccacagtcttctttgcagggtgaagcctctccttctcctctcccattgatgtacaagccacagggcactaactcttccatggtgctaggctggggtgctgtttaacataactcttttccaacagcagcccaaataatgcattgccataaagacatgtgcctgatttatcactgaccaggatgtttacagcataaaatgtagttcagtctaatttgccatatggaatctagagaaaagaattctaacctctcataactaaaaagctatataactagacctgttcttgactttgaaagatgtctgcctcagtcaaagaggtcttgtaaattttattttgtattatcttagtgtctttgtcttcctagtctcttggacctcgcaatacccaaatatcccagtgatttaataatcatgttgatggtgttgggtatttttttccaactgggaaagtaaagggaaacagcaaagattacttatcagatgagtgcaggaggcagccatgccattcagaccaccccagttccaacaccacctctagaagatcagaacatgctgtcttgccctcagaatagtgaatgataaatggcaaaaataaaagtagaatagttgtgttcaaacaagggacttagtttaaaaaacaaaagaataaactgctctcactttaaatttgtggtgtctgtgagatgtgcactaagtcagatgctctttgccatgcagtaaaagacaaccctatgtgaatttagaaaggggagcccccctttctaatgctacattcaaagtagcattcttagcacaatttagacagtgccttctctggagaggtaaatgaagaaatcacaaactagaaaaaaagaaacaatatctacagaacaaacacaggagaaatgaagaaatcacaaactagaaaaaaaaatattgtctacagaacaaacacaggataatttttccttatagtttacaaaaaggggactcatggtctgggaaatccaagaaaagggttgacatcgtagcatcaaaattgcctgtcatttaggtcacccatggttgagagagggtctgtcctcattctacatgaggctacaaattgtcgtcagggtgatccatggataaggcagagagagccaacattatccagttgctatctcagccaggttcaagtataaaaaaacttagaggagaaaattaggcaaacatatatgtttgtttctcatggctcaaaccgattttcaacaagggacaaattattttaccattaacaaagggtaaagtctaaaactttatggatttagtcttatgtgttttgattttgactctacaatggtgttttaaattgacacactttcttttttcttttttttcttgctttagtagccaaacctcttcttagccacctcactgtctcaaacatgacctggggcagtgtgtccatctcgtgggaagctcaggagtctgcctttgatagctttcttatagaagttagtaattccgatcacccccatgagaccatggtgctgtctgtgcctggggtgtctcgcagctctgtcatcaccaacctcaaagcttcttctaattacactgcccaccttcatgggctgattggcgggcagcgtgctcagaccctgatggtccaagcaaccacaggtatttcctattatggcttcttcactcttcattgaatttcctctgaatagctttccaaaaatcacccgctacccacttttcaccctcctagttgctcccaatccttctcaaatttgatagagccatccaaatcaaagctttaaagctttaaaataactctcaccccaaattaaagaatttcagtgtcaaacctctttttcctaaatatccattcacatctggagttgttctgtttgtttgtataaagttaacctgacttgctttggttgaatttctaaatcatcttttcatctgatcttgaataatctttttcaatcccacccattatcatctgcctgtggtcgttctaatcaaagtttgcctatgtcatgttcaaagaggtatgtgcatgccatttctggtgacttggtcagaaagatctacactctttttctctctagcaggattttaaaaaataaaggtgccctgagcatgctgagaatagactctgaatcacaacccaagaattgcatgagaggacccagtagtcttatcttgttctcgtgatttttgtctgaagactactcttttttgacatgtactttgtcaagcacattttgtcacccactgatagctgtcacaaagtctcaggctcttctttcaagccatcatcttgtccaaatcttggtgcatgtggtgaatattcagagcattaaattttgaaaatgtttctttttcctggaagcagctagcatgtccatgagtcatttcagaaggtttaaagtggtgggagaaaaatgcccctcattttgcatggaacattgaccataccctaactaccactatctttctctgttttttcttgcatctcatttctcagcttggttgcaccctttgagaggcagctggaggtaaagctgacctcaagaacctgagtcttattctgcatggtgaatctgttggcattgatagtctgtctggtagcatgagaagaatcccagcatgcatccttaatttgggagattgtttctacagcaaaatatagggaaataacagagttccacttggaacattttaatcttttgtgtggttgagggaatttgtcaaagctatagctgcaaatgattgcattgttaccttctgaaactaattgataaggaggatatcccatgtcaatgctaatggctatattctgcttctgaaccaaatcctttttgttcttagagattttatgacatcgaattatgctgtataattgtgccattaaagtttatccaaatgagccccttctttcctccaaactttggagctgaagcaaaataactcccaagtccttggaagaaatattgtgcctcttcccaaccctaaatcctgatcttaatatctgaatcctccagtactgttgcctctctctaaaatacagtctgggccgcacttactttaaaattagttttatttgataaatgagcatttaggaggccagccccataaacatctagccatatagaccccttaacattaaatgagttgctctcaaaactgaatgtctagactttaacagaaaagagatacttaacctcagggaaaccatctatctgtccaaattatccaataattgagtttcctaagcagaaaattcaatgcctaacttcaagtttttctttcacctttgcattcactgggaattttgaatggaagccatcttcacctttacggtattaaatggtaaaatatagattttcctacaatgcatattaagtactgtaaaaatttctcttgtatgggtattagcctttaatttgtgcaaacagtagatactaaaaaagaatactaaatgaggaaactccaaagaagcattttctaaaacatgttcaatggaacaccagctccttgagatgttcaaaggatattcctcagatagggtatacattgatcaataagtttatgaaatttgggccaaacaaaattaaacaggtttactgacagaaccagcctgtcagagcctttaaaatgcaaacccaccttgtgaatctctatggtaagacataatattcggtgtttaccatgcatacttaatcataaagctgtcttttcttggaacatcttacagggcttgtgtccccagtacaaactttagaaaatgtagccttaatacccttcacgttactccaatctaccactctaatggcttgtctactcttcttcatacatgactagcaaatggtggtgtttatgctttaaaagaacacagatctaaaaaataaaataaaaataaagaacacaaatatacacctgcagagaaagcaatatattttctatcatcatattcaatgcaggtgtagacacagcctaacatactgtctcttctgtatgtatttggagatattgatgctttcatgttctatggctacattctggaaaaatccactgcttcctctaataatgtctctctctttctctctgcccatattccttctttagaaccaaagccacagttgggcacgctaatctttagcaatattactccaaaaagcttcaacatgtcatggaccactcaagctgggctttttgcaaagattgttatcaatgtgagtgacgctcactcactgcatgagtcccagcaattcacagtctcaggagatgcaaagcaagctcacatcacaggcttggtggagaacactggctatgacgtcagtgtggcaggaaccaccttggctggggatcccaccagacccctcactgcctttgtcattacaggtactcaatcagaggttctcacttgtctaacacagagagaaaaggagataagtcatcttaaaggaaaattcaacaaaaatacaatcttcactgcaaatgtgtactctcttatttttaattgacaaatagtaattgtatatatttatggagaatagtgtgttgttttgatatacatatacattgtggattgattgaatcaacctaattaacatatcaatcacctcaccttatttatttatttatttatttatttatttatttattgtgctgtgagaacatttaaaatctactcttttaggaattttgaagtattcaatatgttattattaactatggccagtcaccatgctgtgcagtagatcactaaaacttattccttctgtctaactgaactttgtactccttgaccaacatctcccctttcttcatctccccaaccccagtcaccggtaaccaccagtcttctctgtgcttctatgtgttcagctttcttagattacacaaatgagatcacgcagtatttgtctttctgtgcctcgattatttcactctgtacaatgtcttctgggttcatccgtgttgttgaaaatgacagaattttcctcttttttaaggctataaagtattccattatatatatatgtgtatatatatatatatgtatatatacacacatatggaatgtatatatttatatataaatatgatctatctatacaccacattttctttatccattcatccattgacagacacaggttacaatacattactcatgatagccaagataatatatgtaaacttctaagtaaagagaaagcagatactattataaaggagaggactttcacagctgctcttaggaagtggagagaacgttctcaagagttgtataaagcttttagggttttttgtgcccagttttattggctgttttatccctagtttagagattctgcctaaaaagtgactcctaagttagtaaaggcctaagatcgaaatcctgttcataaatcatgctaggtaacgcagttcatatatgtgacaaaagtataaccatctttttctttaaaaaataattattcttaaaactgacaacacagatgcagctagatgcagctaatttgaaattcctgtctcctttttttcttttgattaaaaaaaaaatgcatttaccagtactgtcagaaaaaaaaaaaaaagaaaaaaaagaaaaaagaaaaatcacctagaaaagagacgctgaaccttctccactaatcctccttatccctcaggattgccatcactgattggggttggctttgggtatggaaagaacgtagaacttggagtcggaagacctggttgtatatctcagcttaggcacctagcagatgtatgacctaggataagtcattaacttctctggtttttttagatgtgatcggggttggaagattgatgaaggttcaacctcagatggcagataaatttcaagtttaattaagccctacccattcactcaacttgacttcttgaacatttgccaatgttcaatttggcaaatgctgccaaatggtggcagcaaaaacttcaatggcaaaggctgcacatggtgtcagtttactaaattctagcccaaaaagcctcagaaaatatttagaagtctcttccttttcattagtgataattttcagaagacggactttgccatctgattttcacattaaaccaggtctctcccagggtctaaattgccatcactaagacatgtcaattagtacaattaaatatttaattataggcagcatggtgtcctggaagagtgaggattttgagatcaagcttttgtggtttctaaacctctcccacagctttttagctacataattttagcaagttcttaacttgtttgaaccctaatttccttatgcatggagagaggataccacaggcacttctgggagccttgtctcatagattaaatagagttggtgaaatttaactgcctagcatccagtaggaattttatacatgctaggttctttctgctgtctcccaacattattaggaaagtggctttcttaaaaataaccaataaggctagatagaacaatagacctatgcaatcatgaactccctctcgtttttaagagaactttggatgtgttttaatgtaagattaaaaaatgagtattttttcctatccagttacctaatgtgaattaaatcattcagatgagtcttcaaatgcagaacatggtaatttcttaagggactgagacaaggaggaacgagatgagattctcactcctcaggaggggagaaatggccacagatcccatcaggccattgcttgtagcggcttgcaggacctcccacataacagaagaaaaggaagctgagagacccagtcttgggaatcctagatccagttacagcattgtctcagctaatccatgatgtgaaaagattgcgttttaaaagaagcatattaaaaaagaaaaaaacaaaacaggagggactcttaaataacaagcccttgattgcctaattagcctgaatgccctcactttcattggaattcactgctttgatggtgtggaggtgcaaagaggccagctatcaaagagagatgccacttatctaaacaaaatccaggaacagaattcgagacccttgtctctcagatgaagattgtttgcccagtataagagatttcatcctcgcttttgatagaattatgattcttgggaaatctttacgtggaaaaaactgcctcagaataaacaccaagtgtttcaaaataactacaggaagtccaagccacagcaaaatttaaatctctatttacaaaatgaaggtattcattcccttattcattcagtcaccaaacacttctttttaaaacatttttctttatgtctcatggattagaccctaggcattagtgaattaatgcaagagcatttatctctttgtaagtttccatttagctgtaatggaaaagaagtgtctaaactagatgcagctaatttgaaattcctgtctcctttttttcttctgattaaaaaaaaaaatgcatttaccagtactgtcagaaaaaaaaaaagaaaaaagaaaaaacacctagaaaagagacgctgaaccttctccactaatcctccttatccctcaggattgccatcactgattggggttggctttgggtatggaaagaacatagaacttggagtcggaagacctgattgtatctcagcttaggcacctagcagatgtatgacctaggataagtcattaacctctctggtttttttagatgtgatcggggttggaaggcaggtagcaatatctaccttactgtatcattttgaagactaactaggataacaatgtgaagccttgtcagttggcaagtatcaatggaaacttagccaacataagctcactccttttggatatcccaatgtgtgaaaaggccctttagcacctgagaaatcagaatgcctgggacatacatgtttggtgaacgaatgaaggagagatggtgacagaatttactaagacccagatgtgttcttgttttctaactttatccaggaaaataaacagcaaaagatttagcaaatcttatcatttcttagtgggttataaccatgagctattaattttgacacaaaaaaaacttacctcctccctttatttcagcttgtgaggatatctcactaattgacttcattaatttgattcaaactgtgcactagaagtgggatagaaacacatgaagtataccggaaagaaattatactcgaaaaaaaaaaaaagagctgaaggcagtgggaagtagacaacgggatccaaactcaacaaaatgcaacctatttgtataaagaactacatggcctttggagtcaaacctgactaaaatcttcgctctatctcttcttacaagcttgtaactttagctaagtcaatcaacttctttgaaactcagtttgctcacgtgtgaaattagaataatacctacctcatgggctattaagagaattgcacaagataacactatctggcacccaataagttcttactgaattttcattttctaagcatataacacaaattgaatgatggacttgggtatctattggtgttcttggaaacgtgtgctatcctgacagagtcagtgctgctaacctgagttattttcactcctcccttctttcagaggccctgccccttctggaaaacctaaccatttccgacattaatccctacgggttcacagtttcctggatggcatcggagaatgcctttgacagctttctagtaacggtggtggattctgggaagctgctggacccccaggaattcacactttcaggaacccagaggaagctggagcttagaggcctcataactggcattggctatgaggttatggtctctggcttcacccaagggcatcaaaccaagcccttgagggctgagattgttacaggtatttcaaatcaagtgagccatttgttcctcttcctggtccccttctgtgtaatctgtctaccggatcgccatgactttaacatctttgttcacattccctacttaatccataaatgtagtctactgtttcaccttctccccacactccctcttgtcatatgtacttaatgaacactccccactcccaccccagaaatgagaaggtcgaaatatttctgctttgtattcaaaatcctttagaccttgtcttgtccatagctcttgtgtgcttacctcatatcatcgtcccttgtgatcaacctggctggtccccagctacatttcagccttctcaaaagaaatataccaatgagtatatttccaaaacgtatttaaaacttttgccatctcaaaatctcaaccatgatcttaacaaacttacccagtgggctcgtcattggaaaaccaaatgtgaacttattttatcggtaatcactaatatcagagagactctgcaacacggactaaatccataattttctcaagactaatgattcctacagaaattaacaacggaatagtcaaacatctgtgtttcccaaagtctttctagagattactagctccacagaatgttcaaaggtcctactcggtgaggaaattccacgttcaaataagtttggaaagactgagttaaacaaagttaaagaggatctttaactgcacggcttttcagaacaccctaacgtgcatcatctccaagaagtacttatccaggcagtattttccaaacttatttgacaaaggatactttttaaggaagaggatcaaacaggaatagttcactgtgagcacactttgggaaactcagctctaaatctacattgacattgagttttgtctagttaaggcaatgcaagatgaaaccctgggtccacagtatgtagcacaaaaggttccaacctcagttctaccatctgaacatttatctaatagttaataaaataacaagaaagaatgcaaaaaaaaaaaaaaaaagtcaagggtaggagccttctttagtgaaacagcactaagaacaaagcaaaaagaccataacattttaaaagccattttgggcaggctcaaggagaatgtaatcagcagtatcatcatgagcagctctacagatcattaatgctggtttatttgtcttttcaaaaagaaaagaaaaaggtcttgcaggggatgggcactcagccactggaagacagagagcaaatgtaaacaatttactggctttgaacttatttaataatatgtgggacgggccaatgctgagtccagatgtggatttactgaattgcttttagacaaaactcacatatgcaaacatatgcttgacttgtattgaatgtgtctactccatctttcccctctcctgactctactggacttgttaatgttgaatgattttatttttggtatctcaggacacttctatctctgaaagccggggcatcactacatattgatacccctactggagagaagattgcacggactggtaaatgatgttgtctttcctccttctcccaccattttctctccctctagaagccgaaccggaagttgacaaccttctggtttcagatgccaccccagacggtttccgtctgtcctggacagctgatgaaggggtcttcgacaattttgttctcaaaatcagagataccaaaaagcagtctgagccactggaaataaccctacttgcccccgaacgtaccagggacataacaggtctcagagaggctactgaatacgaaattgaactctatggaataagcaaaggaaggcgatcccagacagtcagtgctatagcaacaacaggtactgtaaataaacaggagagaacagagaaaagtcatgactcaggggtcttcttctcacagggctgagtaatcacaggagctttggatgcaggcaggctggcgctctgatcctgactctttcaattacagactgtgttaccttggacaatttggctaagtccttatgcaaaaaaagtatgatgccatttacttaatagggttgtgaggattaaatgagataattcatataaagcccatagcggaaggcctggcaggtagcaagggcccagcaaatgagagctattcacgttgccattaatgcatcatcatcgttacaattatcatctttttttttttacgttccaaagattcttccttctatctattatctcatcatatctcatctcatcatatcatatctcatcattttatccagagatacacttccttgttctttggccaaatgttcgagctataccaagtagggagataatggagaagcagcacgtctatctatacacattaatatttataaaatgctacatgtgaataatcagtacggtgatcagcaaggataaaggagagagctggcaagattaacatgctactgtttatgaagctctctaactttgatactcataacaactctgaaaggcacctagagtgtccttggagtttaattacctttttccataggagctgtttcaaggagaaaaaaaaaaaagatggttaataatatgactcttaggcccagagtgatggctcacacctgtaatcccagcatttcaggaggctgagacaggaggatcacttgagtccaggagtttgagaccagcctaggcaacatagtaagaccctacctgtgcaaaaaaaaaaaaaaaaaaaaatcaaaaacttagccaggtgtggtgcctcatgcccgtagtaccagctactctgcaggctgaggcaggaagatctcttgagcccaggaggttaaggctgtggtgagctgtgttcgtgccactgcattcccacctggacgacagagcaagactctgtctcaaataatgataataataacagtagtaataatatgactctttgtaataataataatactaagatgaacatgactttttaaagagaaaaggaaaaacctccaacaagtcaagtaaattatttcatgaaactgagggagatgcagagacatagcattcgctggagatggctgcttcaaagggaaccaggggacagaaccacaaaatcaccaggagagataaaagggacctgagagatgatgtagctcaacctcttctgtttgtgcatgaagactctgaggaccagaatggtgaaatgatttttctatgatcatagagctagatttggagtaaagcccaatgaccagcttattctaatactatttaaaatgagcagtctggatgagagaaaaccaatgcatatagctacttgccatctctgacaggcataggcatgacatttgccaaaacctctcctttttgtctaaagatagatattttatattgttaagttttcaggacctaataagtggcaagaaatcacccatgtaaaaataataatcagtatttgtaggcttggagaaaatgctagaatccaggcagcaacctagtaagagggaaaaaccctgtttcttattaacagggacaccctatcctgggatgcaggtctcagtctcctcctccctgtggctgcccataaaacgactccagatcagaggcagagccttgattttgatcttggtttataaacagtgttcttcgaagtttacttcttctgatcattgatttgttttgctgatcttttttttctagaagccctgcagttctaaagcaaaaaagagaatgaataatcatgaattgaattttttttaagaacaacaaaaaaaaaaggcaaggcagaccctgctcttttggaaagccctctctttgattttcttctctagagcctagtagcttatagccaaagagaggtgcccatgcgcgtgcgtgcttgtgtgtgtgtgtgtgtgtgtgtgtgtgtgtgtctacatgcctgtgctccaggaccaggagaagacaggaaagggggctcttgagcacagaagatgcctaatttctatcttcacctcatcaagtttataaatttccccttttgttttttttttttaatcctttctcctctcctctcttcctccctcataccattgtaaactcttctctgtaatgtcctatccctcttcctcctgagaaggccctgctgtagctcctcctctcactcacaaggtacctctccatagcacaagctgccagccctgggtgcccagggcagtagaaagggcagtgggagacagtgttgcctggtggttaagccaacaaccatgggacagtgtccttggagtttcatcatggctctacctcaattccttcatctggaaaatagaatttaactcaaaggtcagccacgaggtttacataagatcatgaatgtcaagtatttagcagaatttctttacccacagtaaccatattagctattaatgtgtttggccataagatacacctactaaaatgtacctacaccaatgaggttttcagtcaaagcaatagtgcgagtacaccaggttggcagagggaagtcctcagtgcctgagtttatacacctcactgttttttgtttgtttgtttgtttgttttttcccagttagactcatctcgatctttcctaggggacaccttaaagtctagtatggcccatggaggaaagagggacattggaaagaaaataaagagagggcaatcatatttactgaattctcactgcatgccagatgctgtgctgggagtttcacatttgttatctctgctaatcctcaaaacatccctgtgggtgggtaccacttttccctctggacagatggagaaactgaggttcacagaagtgaagggacctgcccaaggtcacccagcctctcagtggtatttggacaatgaagctctttcaggctccagagacccatgtggtttctgaaactttccatgggcagggcaaaaacccaggcagccacagagtctgggggtggctaccaggccacagaagaaagctgtaggaggagatgtcttagatgagagaaaaatgcagaaagaggaagaaaaaaaaacccttgctgaatttctgtgggtttcagcatgtaataatccctgtgggttggagaggggaaaagatgaggaagtgagttccctagagcctgaaaattgtttcctgaattctctgggtaggcatggttagctgaagagggcaaaaatcgcagccaaaaaatacacagagaaaagccaaaggaaactgggttttgaggggaggtattttgggaggcagaaactccccctgggcatggcttttctcacaggtagacccagcgtccactgggtgtttgctttggtgatgagcctgaggttgttctcttggctttggacctccttccagttctaggaatgggtttgcccaggtcagtgtttgtgtgaacgttatttccaggattccaggctgtgcttggctctgctgcctactcctgggacccagaaagatcacatcacaagaatgttcatggaagccttggtttggttctctgtaaaatggctataatcacatctttttgggggcttctacaggaggattaagccttataaattgcaaagaactgtacagttgtcaagtcttagtattatttaataaaaggaactagaaagcaaagatttaagaaaatgttaaaaatcaaaaatgaacgggggtcacattccaatctgggaaaccattctcccacgattccttggaagtcagctatggtcctatcactccccttgaattagaccaaatgacttttctacaaccctgggccctgtacctgaaatgaaacaattggtcctagcaagtcacaacttaaccacagatcaccacattctccatcctaaaggcttggctcagacacaaattctaggcactgagttttcctaaataaggaattcaggaagaaccattgatgaacaagacagttaactgtttctgggcttctcttgtgctttcttcttgacagccatgggctccccaaaggaagtcattttctcagacatcactgaaaattcggctactgtcagctggagggcacccacagcccaagtggagagcttccggattacctatgtgcccattacaggaggtaggagactcggaaaggggagagagaggaggagtgttgtgggtttggatggattcatgaaaaagaccctgataattttcatcctctaacatcatgatcaaagaaaatgaattctttatttgtgagaccatctggagagaagagaactcatttgtaaagtgctatgaggttcttagaagaaactttcttgtgaagggtcacttgaacaagaccttttttaaccttgaaattataaaattctatgagaaatagatctctagtattgtttgcacacaatggcaaaagattctaaatatattggcatttctctccctgcgcacactcatctgaaaagctagtcttggatatatgtgaagttttacctttgggtaccaaatctgtctgtctcagcaaatgatggcaagctgtgccttagaaaatttgtgagttctaactcaaagcgcatgggctataatagagaccacaaggaggaagcccagtcaaatctgcctaaagacactctggcaggtagtaagctacctgttgctgaaagtgtataaagagaggatggttaataacctcttcacaggaatgctgttttgtctctataggaagtctgaccagctgatgtgcaagttcttcactagcccccaaattctaagaaatacaatttctgtgtttattaataaacactgcagcacaaacttgactataatcaactttcttttcttaagtagaatttcctctagtaagggagtctataatcctaagccaagacaatgggtgcaatagatctgacatacattacatagtaagcttcccatattgtttgtggggaaaaataataagataaaatttgcacaacgtgccagctctctactgaacggaaacttgccatttttagtacgttgtgacttcatgttttcccccgcccctcctggctttgtttttggcatctgcaccaatagaaaaagcatacaaaaagtaagccttcttcccttatgccagagggtaggagcaaatgagaagtcaagaaagtggtgtttgatgaagatatagtttcatttctaaatcagatacactctttttgggggcaacagtgaataagtgtcagtgaggttcattattcctcatcttgcttttactgtgttccaggtacaccctccatggtaactgtggacggaaccaagactcagaccaggctggtgaaactcatacctggcgtggagtaccttgtcagcatcatcgccatgaagggctttgaggaaagtgaacctgtctcagggtcattcaccacaggtgagttggtggggttgtgtgtgtgtgtgtgtgttactatttttcagaggtcacttgtgcatcctatgccatttctcaccttcagccttgtagctcatgactcagcagctggaaaaaaaggggggttttatttatgagatcctagtggaaagtgaactggatttagagtgccagaggcctctcttctggcccatcccagcctctggtgagctgggtgaccttaaccttgttgggcctccatttcctggactattgtgaaagaaaaagtccaagtttgggagtcatacttacctgaatttaaatccaaattctaccaactacatgagctatcagtccattttactagggtccactttccttctctgtaaaacagacacaattctgcttccctcacagggtatggtaaggatcacatgaagctgtgtttgtaaagcatcctgaaatacaattgttcatgttagcccaccatcaccttcacctccccgcctattgcctggaacccttgtgagtgtccctcaaagcaggtgtttcacatgagcatgtgatggtgacagctacaaaacagctcctctctatttggtggctcttgcattccaggcactgttactaaacccttcacatttaatccccacagctattatcatccccattttacagaggagacaactgagacaaatgaaataccttggccaagcccacataattagtaaatgctggaaccaaatttgaacataggtcggtctgactccaaactctctatccttctaaaataaagagttcctttcctagtgtaacctgatttgtacagtacactgtaaagaggggaaaataatgaattgcattgaaggagaatgaagtggaaaatttctcttcagacagccatgtctcaaaacaatttatcctttgatatgtgagcaattatccagtccaactcattaagggatacaaagaatagacctcataggaaattttaaaaatatcctcatagcctgaaagagttgacaacacacaattaaaatatcccatctgaacccagagtcccgtccaccctgcctcacaggcccttatttccccaaagaaatctttcatcagtggattctccacggcaacagatggcaaaagctgaacgtagttcctcccaatgccccattgtcatcaccagttaaaggagattctgtccatgcacagtgaagcaggaaggaactcagagtggacaatgtgggctccccagttgccctgccacatcctggctctcagaccagtcatttcatccctcaaggctcaggtgcctctctgtgaaatgagctgaggatagcttccctccaccctcgccagggctgctggcatgggcacaattgagtagtaagtgcaaaagcaagaggaaatggtcagattcatgctggcttctgagaaagtgatgttgggtagtaggagaggtcagttaaaagaggccagggataaatatcctttgaatatccatcctttctcagaacaagtcatttgaaaaccatacttaagacttcaaatacctttaatagagatcttaataacaactgcaagtattgagagctttccctagtacatcttacacatcacacattgcttagctagtctttattaactaaacagtcaccctttggcagctgaagaaagtgaagtttggagaagggaaatgaattttcccagggcacagaggcaccaggcagagaagccatggtagaacccgggaccaccggcctccagagcctggctttatgttctctgcaagccatctaaggagaaataccactcaaagctcagaaaaggctcggggccaggtgcggtgactcacgcctgtaatcccagcactttgggaggccaaggaaggtggatcacctgaggtcaggtgttcaagaccagcctagccaacatggtgaaaaaacccatctctactgaaaatacaaaagttagctgggcttggtggtgcacacctgcaatcccagctacttgggaggctgaggcaggatcattgcttgaacccgggaggcagaggttgcagtgagccgagatcgtgccactgcactccagcatgggcgacagagtgacagtctgtctcaaaaaaaagaaaagaaaaaagcaaagaaaagaaaagagaaaagaaaagaaaaggctcgggcagtcttaactatgcaagtcccctctgtgtaagttctttctctggggaaagtaatataaacaataataattcttgtcatgtgttcagccttgttcagtttacacagctcctttccacccataatataatggaaaaatcaaaataacactgaagatgaaaccagccagaattactatccctattttacacatgaggatatagaggcccaaagtaactgagccagcaagggagggagtcattactcaaagccaggtcaggctggctccaggcttaggtctctgaaccattccatgcagctgacactgtcctaacatcaggactccataagcagtgtggacagcagagcagctagagtctgatgtcccacccaatgacttccctcctgtccaccatctttctttgcagctctggatggcccatctggcctggtgacagccaacatcactgactcagaagccttggccaggtggcagccagccattgccactgtggacagttatgtcatctcctacacaggcgagaaaggtaaggttttgtccaagtctctcctcactctaaggagtgtctttcctgctgtaaactcttcccattcgctcttctccctgccacatttggtacaggatgataaaaatgcatgggtaggttgaaaaggccagtaatgttcatgtggctcccaactgaaacctcaagggagtctggtaggtcatttaaaataaaaataaaaatacatctccagcctctacatgttttcctggcccattcctcctctcctgttagtatctctgcctaccagtgtgagacaccccgtttaggaaacagttgtcatcttttacaaagaagaaaaccagaatctaaaatcttaaccagaccgcttcaggccatactgagcagtctcaacttttcagagaccacaaaagaagctagttttagcagatttaattaaaaagtctgaaattttaagccaggtacagtggcttacatctgtaatccagcactttgggaggccagggcaggtggatcacttgagaccaggagtttgagaccagcctggccaacatggtgaaacctcgtctcttctaaaaatacaaaaattagctgggcatagtggtgcatgcctgtagtcccagctactcggcaggctgaggcaggagagctgcttgaacctgggaggcggaggctgcagtgagccgagatcgcaccactgcactccagcctgggtgagagagggaggctctgtctcaaaaaaataaaaataaaaaataaataaataaataaaacagaaatgttttcttgtttggcaaccatcagtgctaatgtacccagttgacagattaaacacttgtttagagcaccagcaaactacagctgccagaaagtaaaatcaaatataagtaagagactggagaaagagagagtgcttttcaatgaacccctccattttgtaatgagctactctagaaataattgtgtaatttcaatttccaggtataggtaagtttcatattttatggtttggtattgttttgctctcagtgacaatatgagcaggcaccagcgtctgtgcctggagcctctgaaaattttcattcagttatggtaaccaactaagagaggtctttttgaggacagagcacaggtaggggtggggaactgatggggaggagggatgttgggtttattctttttactctttaattcttaaatagtccctgtgagcaaactcttctgagtcaggaaagatggtgttgcacctaaaatgaatcaggtatagttcatgggaaccatggagattgtagattcagggcaaacaaggggcttggttcagaagagggggtggtgctcacaaatgatgaggtaagttgaccaacttgtccccgcttgcctggtactgtctcagttttagcaccagaagttccacacctaggaaatcccgcagtccctggcaaaccaggatggttggtcacctgtgaataggaaataaacacatgcccccaagcaatgtgatcagtattgctttccaccactggacatgacccagcaggcctgagagatagtggccaggctctggtgcagctactgctgtccagtttttgtgacccctcagcctaatgacttgatgacacttagtaaattataaaagggcatgtgaaaaagtgacaaagagaggagagcatgcatcaggacaaattaagcatgggcagcaggcttggggatgtcccctccgaccgtcctctacctcggtctcagtggcaaagcgattccagccagtaccatgtgggaaaaaaatctcctgacccccagttccccttccttctgatttggggcctggaaaaattaagtctccatatgagaaatcctttacgtatgaggtgagtgctcaagagagagaaagagagcgtgagtcatttcagaaatcagacctgcttttccgcagggtcactgaaagtttcgatgttcgaaggaggtgtgtatgtggtttgccaagcccactcatggctcagacagtgagaggtgactgccttggtatgtgtatttcatgtttagtgccagaaattacacgcacggtgtccgggaacacagtggagtatgctctgaccgacctcgagcctgccacggaatacacactgagaatctttgcagagaaagggccccagaagagctcaaccatcactgccaagttcacaacaggtacaaagacactgagagctggaagctctcccttctggggtgcccacccacagcctgcatcttaaacaggaaccgctagccagttcttctttcttaagtcagggccttgcaatgtgattacatcagcatcacttaaattcaccagtgcccactcagtcaaggcctgaagaaacacactatttccttttgaactgaaatgaccttggtctccccacggggaaggaaaagattttaagaggagggctttgtaagtggaaaaacagttcccactggccctaaacctagtatttaatgatccacgttccaggcaggaaaatatttttgaagaggcatattttttaggcaatttttcctagatgtttgttaggtttctatacattgagagctttttacaaactatagcaagcagggaaacagaggaaccatcctctctgtcagggtgagtattgatattagcattcatccatcctcttacttagaaacaaggggcttgataatgatgttcacagctgtatacttctctctaaatccaaccaaggccagttagaaacatccagcccttaggatgagataaaccatagagaatttgtctttggagatcatctggctcaaccaccttatttatacagaggaagttcttgccaaaggtcacgtagttcagtggtagggaaaggacttgaacccagtcttcttgatacccagcccgaatttctgccctacatttgctgatcttatccgatattaatcatcctgtcttctccagacctcgattctccaagagacttgactgctactgaggttcagtcggaaactgccctccttacctggcgacccccccgggcatcagtcaccggttacctgctggtctatgaatcagtggatggcacagtcaaggtattttaagtatataacaactcctcaatgctagttgaagcatttgcatgatcttcaaagtatggaagaattacctgatgctgtttttctaccccagtgcatctggggagctgaaaaaaaaaattagtagagactggatggcatgccagaccttctgaatcatactctccagcctctttcattttaaccagactccagttctgataggcagccaagatcaagaaccactgcttacaagacttgaggacattttaggagctggaatcttgatcctttaatattttgttgaacaaaggccaaaaggtttctctgcatgtttgccatatgtattatctcacagatggtatctttatattatatattgtaatatgtttcaccgtgttcttatgatatcaactgttaataccatttttatccagtgtttatattatttatattcgctacccaagaattttctttcttttaccttttaatttgaaataactttagatcttcaaacaagcgaaggagatttcctaaactttaccttccaaacttgttattgaatttttcattttggttatctcactttatatttccaagatcttttgcttgttctccacacattgatctttttctggcattttgtttgtgcttcctatatcatcatctctttatctctaagaatatgttgctggtattttattctatatcctgcacagtgtttgttacaagtttctttgttttgctgctgttgttgagtttggtttggtttgggtttctgtctttcatgttggagacatccacccaatgtctgttgatcatggtctgtctttttgtatttgaactaggaatgaaagagctaatagggagttagctcaggcagggcttgtcaactttgtggctccctgcagaatgattgggcaagtacccacagttttcttgggggacccccaaataacagtgccataaaacctggcctctcactgtgtacaaactttcatcttattatgtttccagtgtagcacctcggcctccttgaaggctgagcctggtggatttgaatccggacttcctctctggctcaacctttccagagagtaaacctcagcctaccatctgaatgggaaagggcagtcatttagactgttggagggaatgaggagatcttagagtctgtttcttacaaaaaagcttctaaacaaaccaaacctttgttcaaccacactccacattggcctttaaagacatctctgcttttgtacacattcctttactgaacttgctggactctgtgacttgcaccaagcagcctctgactagctctgcccatgctccttagttaacctcagccttcttcattcattcccctccatggtctctctaccactcactttctatctaccaagtttctggcacacctgttgctgtctcctctcccattcccctcatcttcatggatttataccttacattctcttgctctctttttagtgggttttagaagcaagtagagatgagtggctgtatccaatctgtcatatttaaccagaactggacacattgctaataactatcatgccccttcctggaattgatataacaatgaactatctcactgtgtgagctgaagcaaatcctttatcttctctgggtgtcagtgttcccatctgtaaaatgaatgccttggacttatccatctttaaggtcttctccttgtcaggcattctaggattctgtgtttacctgaatcatgagtctcattttgatctagagtaccctaattgcctagaaaatggctttgcacagaagcctagagaactgacaggtaattgtattcctaagtaattcaatgaacccagctttatccctgacagttgatctttcccccagggactagaactggggggctgcaaaaaggcctctgggtattaaatgagcactcatcccagtttacttttctgcatgtccattcaccagctttacatgtcttagaaaaaaaatcaacctggtataggagaaaagagtcctggacagggtgttgggaaacccgcatgcaagatcatcctctgcctccaacaatttatggaatgagagcaagtcttttagcttctctgaaactcaattctcccattgaagaaaacaggataaggtaccttcccagttcccaggatgcaggagaaccttccaggggcttctgcactgatgcatgactgcccaaactaagctggctgtttgcaggttgtagagaagatcgttgtgcttggtttactaggagtgtaggttgaattccaatcccagacactaaggtcatttgctgaaaagaattggaagctagcaagagggtgtggaaagaggatttcctgcaaactgaaaccaatgacctcctctgtacagcagcacagagaccagccacagactacaagtgtagttagagttggtcaacatctgtctgtcatggatatctctgttctagaagagagacatgtgaggtcagcttaagttttaatcctaccatgcctatggggctattataatcatctcctaactcaagagatccccaaactgactgcacattcaaatcacttgggaagtttcttaaatatagccaggcccaacttctggctctgatgattccatcagtctgagatgaggcccaggcatcatattgttttaaagcttctgagagtgataaagagctatatttagggaccactgacctaactgacctcaaagtcccttaccctgtgtgattcatcttgctaccagattaagcttcttaaagcacagcttggtttatgtcattggcatgtccaaacatctttcaaggctccccatttcttgtgatgataaacttcaagttccaaagcttagcatttataccttacagggctcctcactccgtttaatgataaactttaagtttcaaagcttgtcatttaaaggcccttcataatctagtaacattttccactgttctaacacctgaagctaagtatggttgaggtcgcttattgcctccttatattatttcattttatgttttaaatctgctttattcaaagtttactgatttaaatattaatctcatccaaaaaaaaacccccttcacagaaacatagaataatatttgaccaaatatctgggccccatggctcagccaatttaacacataaaattaaccattacaatcccattctcccaatatagtttggcagggccttgggcaggtggtagccttagccctggagtctacagcagtgctctcatccttaccagatgcggtctctccctccttatattattttaacttgctctgcaccttctggcccaaggacctttgcttgtgctgtactctccccatctctgatatctcagcagtgcacatggagcctggtagagagtgggtactcaatgaattcttgtccagtaagtaagtgaatggatgggtaaatgaacttataaatagaatgacttcttatctataccctgagaatttctgtgaccaaaagccattatactttttcttctgctcttaggaagtcattgtgggtccagataccacctcctacagcctggcagacctgagcccatccacccactacacagccaagatccaggcactcaatgggcccctgaggagcaatatgatccagaccatcttcaccacaagtaaggaggcccagggtgccatccagccttgagatctaactttgactgaatcaacccttgacttcccctttgacttctactttaaaattttcaaacaaacctctgaaaagaatcgattcactgctactacttggaagcctgaggaaagcaaatgtgggagattatgagcatcccggtgaaaggaaaggaggaagcccatctggattcagtccccatttctatcacctgctaggtgtgccttaagaatgctacttccatcctataatctttagcttcttcgtctatacagggagattaataataaatcctctgtcaccaggaccttgcaagtgttcatgaggtattgcatttgaactcctagcccagtatgtggcccatataattgtgtggtccttttattgtcagagttcaacatgagctgaaagtctctttctttctccttcatcatgccagtgtttacaaaacctgtccacattcaaaatcacaaatgatcttcccaccaagctggtatggtgagccctatgcccaaagttctagtggggaagcagacactttcagagactaaatgacctgttcaagactatcttgtgagttacagtcagagttgggctcagatattccatgcccagggagcctccccctgcacctgtcacaaagtatcttctgcagatagcaaacctgcaagttgttccattgataagtaagagtggcatccattcctgaggaccagaggagctggcctttggagagccctgcctttgaaaattcacgggacagtcattctgcacacatctgctgaagaaagtgcttcccctttgccagatcttatgccagatgctaactatgaatgtatcctaaagatgctcttatactagggctgtgaaataaataagaaaacagctcatgatacaacctcagatgaatgtcctcagatcagaaaaaagaactgctatgatcatcagctctaagacccatctactaggcatagttccaagattgcccatttctatgagtttttaattgtttgcatcacattattgcacctggaaattccccaggcattctagtccatagagttaagctaagaattaagctccagctcagtcctcctgcactgagagcatcaccatttctccttattccacagttggactcctgtaccccttccccaaggactgctcccaagcaatgctgaatggagacacgacctctggcctctacaccatttatctgaatggtgataaggctgaggcgctggaagtcttctgtgacatgacctctgatgggggtggatggattgtgagtaccaccagggactgcagagccctcaggcctaggggaagagggagagggcaaagcaggggaggagaagagggtgatctcctcctgatgcactctgacacccccatgtgtgaggccttgcaagatagtgcctgtcacacagaggcactcaggaattctctcttaaacaaaagaatgggaaacacgctggctactttttgaaacggggagataagtttcttgtagtttatctcatccaatcctcatcaaacaactctgtgatgtataaatgacagttgatcattgaacccattgcttacattaattagcactgactaagcatttattatctaccaggcactgtgctaagagtttaagatgaattattccgaccccattaccataggagctgggtagtgtatttttgaattaataaactctatttttttagaacagttttaggttcatggcacaattaagtgaacagaagttttcatatacaccccacacccacccacacaacctccccattatcaatatcctgcaccagaatggtgcatttgttacaatcaatgaacctacattgacacatcattatcacccaaaactgggtggtatttttaatccctgtttttcaggtgagaacaccaagacttaaggaggggcaggtgaccacccaaagttacatagcaaattagggatggacagaatggagcctgatgctctctccacagtgccacactccttcctctcacaacgatgccctctttcctgcaatagcttaagtacacccagattcatcgatatgtttataggtgttcctgagacgcaaaaacggacgcgagaacttctaccaaaactggaaggcatatgctgctggatttggggaccgcagagaagaattctggcttggtaatgcagccctgcatgtttatatctaaaatgcctgattctgccctccttgtcacttttcctaacccacagggacctatgggagagaaagagatgaggaagaagaactacttctggtggcagacacagaatgtcaaattcttaatgaaaaagactatcatttaaatgctctgaatcatcaaaatgtaaaccaaaaagtatctgagacagatctcaatcaatttagaggtttacttagccaacgttaaggacacgcccagaaaaaaagaacacaaagccacaggaacagcctgtggtccatgccttttttttttttttttttttccagagataatattaagagttttagtgtttaaagggggaaagccacaggaacaacctgtggtccatgactttcttttttttttttttttttttttttttttttttttttttcagagataatgttgagagctttagtatttaaaggggaaaagtgggctggagggatatggtcacattactgaatccacatgttgcaagataaaaaaaagaaaaaagcagaatgacaaaaaagagaatggtcaattttgtattcatctcacactcagtaaatcggcactttacataagataaagtgaagatagaataactatctgtggagatatctggccttttatctgtagcatctgcttagggacaaaaggagaggcagtttctcccatgactcggctttcagtttattttttttcctattggcagagttaaattggggtcccaagattttattttcctttcacaaaaagtaaaatctgattaaggaagaaccaaaactcagcccttatgtgttaacctagccttaagtcattctctggaccagtcatagaatcctcctcactgatatcattgatatcttccctcctgtgccccaggttgtgctccaggtgctaagatgggtttcttagagccataatatttaacccccatagcacccctacaaagtactcaattgccaccgggtgggcaaggtgtcaggtgtcagaagtggttgactagtgggttggtaagacgaatttactaacaacagtataggtttgaaaaaggaacgtttattagaaagaaagaatgctgcaaaaggacttacagcccctgcagtggatttttccttaggggtatttatggaccttaaggcaggagcttaaggataatttggaccctattagccatgtagaacatgatacatgattacatttgtagacattttggtgccttaatgtcagcaagggttgcaaaatgagttttgatatgcatgtattccagagatgtatagaagttccagttacctataaatttttgggaaataaacctggaaccagatgcttgcttgagatatacggaagcctaattacctttaaatccctcagttaaggggtttttgtctccgagtcctacttgatggtcaccaggtgatttttgctctcctcaccacctcgcatggataaaatcacagcctcaaaaagactgagtggtttgcccataggagtctaaccaatgaacagttgagctgaaatttggaatctcctaagtcaacactacaatcctatcacccatccattcatccatgcaatccacactttccaaccacctaactgcagagaacattgttctatgcaccactgcctaccccagaaaatgtttatcatattataataaacatttatctatattattcattgcccttcatttgtaaggcactttacaaaattttatttgtttgtttgtttgtttgtttagacagagtttcactctgtcgccgaggctggaatgcagtggtgtgatctcagctcactgcaacctctgcctcctgggttcaagcaattcgcctgcctcagccccccaggtagctgagattacaggcaccctccaccatgccctcctaatttttgtatattcagtagagacagggtttcaccatgttggccaggctggtctcgaactcctgacctcagatgatccgcccaccttggcctcccaaagtgtggggattatgggcgtgagccaccgtgcctggcctgtaaggcactttagagtttaaaaagtactttcaccaccttatctccttggatcttcactaatgcactgggaggttggaagtggggcaaaaatgtcaacccgattttacctgagcctagtattactccagcaagcacaagactgagcttcaagcacaggcctgtgtgatatggcccttttttttttttttttgctttctgagatggagtcttgctctgtcacccaggctggaatgcagtggcacaatctcagctctctgcaacttctgcctctcgggttcaagcgattctcctgcctcagcctcccaagtagctgggactacaggcacccaccaccacacccagctaatttttgtatttttagtagagacagggtttcgccatgttggccaggctgataacgaactcctgacctcaagtgattcccaccacccccacccccaccccctcccaccccatctctgcctcccaaagtgctgagattacaggcatgagccactgggcccagttggccctgtcttaagtgtacccagttgccgcttttacagagtgaaatagaaatgagggcctcagtcacctgtgcttcttagcaacccttgcctgtcatccacagggctggacaacctgaacaaaatcacagcccaggggcagtacgagctccgggtggacctgcgggaccatggggagacagcctttgctgtctatgacaagttcagcgtgggagatgccaagactcgctacaagctgaaggtggaggggtacagtgggacagcaggtacagtagtggctgcacgtagagcctacaaagccatggagaccttcttgacatttacagtttatttctctaactttcattccttcctcattaatccagcaatttattaaatcaacaaatatttaagtacctactgagtgccaatccagaaaaactacaattcaaaagtgttgggtagatatttgggtcctgaaacattgagtatgttgggaatcagggcaatcaggattgatttctaatgaccatctttcaaaaaaagtgtgtctttcttacccagttttagatatcagttgtagactgattaaaaaaaaaattccccaaaggccttaatattcatccaatccagcacttctcaatttactctgggtgtatggacccactggcgatcttgtgaatctccagatgctgacacaggttgtctgggatggggctgagattctgcatcttctccaagttccctggtgatgccaatatagctggtgttgctggtctgtggaccacagcttgagtagcaaaccatccactccatcacctagctgcttgaatctcttccaagacatccctgccatgtggtcatctagtctcagcctgcatcctcataaatagaaggtctcacctctcaagtggcccctgcattccttgtctggctcataaccttcattccagtcttgaagatttcttggacttgaagtggttttgtgtggtttcctggctccacataagaggagaaataaataaggaaacaacatgtattaaggccctactaggtaccatcctcttttgtagatattccacctgcattcatcttatttattcctcataaaaccattttatgaagacgttgtttttatacagaggaggaaagaagttcagaagagctcagtgatttgtccaaggtaaaacagcttgtagaaggtggatgcaatcctggctgcagaaaactgcatccgacaatgttctcagtgacaaagaagggtcaggactgagagtgtggaccacccccatgcaacccatgcccactttgggtggctttctgttatgtttgtgagagcagaagagatagaagcttggcacgtttccagcctccctgagccctgaaagaaaacatccataaggtgaaaagtctccagataaaaggttgccaaagccaggctgagcctaaggaggcacaaagctcttttgagatggcagtttagtgataataaagagagacacccaggggcaaacattgctttagttcttgaatccctcaaagaatgttggcattttattacctggaaatgaatacctctttggttgagatggcttcaggcaagaagaagaatgttacagggcaagcaaattcattaagcagcaggaatgtggcctctgttcctctctctttgtgcttccattgaggaatgagccataatatttccctttactgagataacgtttgtaaggctgcattttcttgtgtgatttggctgcacccaggccttctgcaggagagcatcctgtttcattaatatctacgtgccgtcctcatgctctgggtagcatcatcagttaaaaaggtatctgggttcctttgacaacttgctccaaattatgacggtagaatgcctcagagtcttgaaatgtttgtgcacagcacttgtctggattgggagtgaggagacccacaaagcaatggtactgaaatgcttcaaaaattcaatatattaaattacaaattagatttccaaatagtagtacatgttaatgggcttcttgtctaagaatcacggaacatggtctgatgaatactttaaaaagtaactatgtgatacagagactatttagggacatctaatgtctgaagggcttaattatgactaataaatatttgtatgtgggagaaaagcatgccattattaaatgcatacttctcaccttactctctgaggtctttatagaaagggaatgcagaaaagtcataaaaataacaatcatagtaagtatttgtatgccatgccacctgtttagcatacacctttattgtcacaatggcactactcagtatatagaatcaaagtgctggttccattgtatagatgagaaaactgaggttcaacaagatgcttgacttgtgcaaggtcacagctaaaaagtgaaaagatgggattcgaagctagactctccaaagccagccacagccctcttcccaccacattatgctgcttctgtcggaaataagtactggggtgacactcatgtcccattcagttccgcattcaatgctgactctgggatcaatgttcaaggccagtcccacacccagaacctttcaattgtcacctctggttctgccctttactgtccaggagggaaatttcagctgagatttctcaggtccatattttctgtctctcccaggtgactccatggcctaccacaatggcagatccttctccacctttgacaaggacacagattcagccatcaccaactgtgctctgtcctacaaaggggctttctggtacaggaactgtcaccgtgtcaacctgatggggagatatggggacaataaccacagtcaggtgagtggaccgtgagggcccagagcaggccaagcttgggaagctggagggggctaatggaagtacaatttaactccctatcctagcagagactaggaggcaggaaccttacttgtatgacaacatgtttttcccaaggcagtgagcaatctcaaggacactgcaggccaggtaaaatagaaacagcacaggttaacccttgacagtcccaaggacaaacactggtcaaatggattccaaaaacagaacgctttactcagacaaaatctctgtctgaaccccaaaagtaaagcagataaaagtggaggccatttaggtgaagcagggttgatgacacagaacccctggcctggggcatctttggaatcccaagaacaccttaaaatgaagtccacagactttaaatctcctccttttgtgaagaaaccaaggcccagaaaaagctgactttcctgaggtcacagagtgaagttggcagcagagccagctctccccacttccagcccctggcattttccctgcaccacacacacctctagcacttctacaatcacagaaacagatttttttcgatcccttttagaaataggcgaacggatcaaattcagtaatctcccttactctgagccttgcctacactggcacattcctgaaaagtgtaaagctgtgtgggactagccacttaatcataaccaaacccctgcccaggtccctccacagaagttagtcaccatccctgggaggagggctggatcttcccttggggccacaccacgctgatccctggaccacaaggatgcttatgaggtctgctcactggaatcccaaggactttataaaaatgcaaagggccaaattccactttatgataaccccagggattctgattcaatgatctcaggcaagacacagcatctcattttttttttttttttgcatatttgcatttttgttgttgtggggtcaggggggaggcagttgatagactccacaagcgattcctgacatgcagcaggtgttgggacctgttgcttttcaatattagtcactttgatacacatgtttatgccctaattaactgctagcaaatgacacctgcgaccttaagtgtagaccttaccttacataatttctggcacttttcaaagcactgttaccttctgtatctcaagggtttatcatttttaccctgtgcaggaattaggatgtggtttttcatgcctgttttacagaggaggcaagagtcacaggacatttcttgacagcagtcctgtgttgtttccatcttattgtgttatttcatcaatatttccattctgagcattattttatcatctttattgccttgtctcaaaaatactcgtataatacaaagttcttctgggaaaagaaaaaaaaaaccaacaagctacatgttagaaagcaagcctctctttcatccttccattcaattatggaagaagaaagagatgacatggaaaggagccacaggaggggagccccagctccagctctgctcctcctgctgtgtggcctctgcaaagtcactctccctctctggctttagtgcccaccacagtacaagaaggcgtggcttccaaccctgaactatcagaggaaagaaccagggcaaaggcaggcagcatgtgcaccaagctgttggactaccatactcactgtaactgagtaattacaagcggatttgcccatgaaatgaatgagccattcttaaacctcacatccctgtaagactcagaaactgcccatgtcagtgaatgccaaacaattagaagcaaataaagtgtctctatttttttcccatctcactagccattaacttccccacagtggggcaaggggccatgtggggtttcatggattgactctaccatctgcagacttcgctgaagagtcaaagttgaaacctggaagccaagacacagatacagttttttcttgtagaaagctttggccaaaatttcaaggatatttccccctacttgagactagggaagtaatatttaccaagcacctacgacgtgcccagctctgtgatagctcctttacaaactcatttaatcttcatctcatctttcaaggctaacattatcagatcttaagaaagaaaaaaaaatagtaaaaccgaggctcagaagatattgagaacttaagactatttatctctcaagtaagaacactgatatttaaccctatatgtcaaattgtaaaactgtgttttgttgagctgttcgttctgctattccataccaaacccctatcaaaatactccataggaatctcgtgaattacagacacacacacacacaccatgtatgtagctattcaattctagaacttctaataatgacctgaactccttcagaacctattcctaaggacggcagatttcatcagccaccattttgcctcaagaggaaagaccaaagctccatgcaaactcaggcgactcttgactcaggtgaaaaactgggtcagattcagccagttcctttgaaagtttccacaacccagaccaacagagagataggcaagaggcagctgtgatataccaaatggtcaaattgaaacagaactcatttagtttgaatgactaaatagcaatgatcagtgaacacctcgcctaacagtaaccaacctggaggccttctctctctctctctctctctcttttttttttttaacagggcgttaactggttccactggaagggccacgaacactcaatccagtttgctgagatgaagctgagaccaagcaacttcagaaatcttgaaggcaggcgcaaacgggcataaattccagggaccactgggtgagagaggaataaggcccagagcgaggaaaggattttaccaaagcatcaatacaaccagcccaaccatcggtccacacctgggcatttggtgagagtcaaagctgaccatggatccctggggccaacggcaacagcatgggcctcacctcctctgtgatttctttctttgcaccaaagacatcagtctccaacatgtttctgttttgttgtttgattcagcaaaaatctcccagtgacaacatcgcaatagttttttacttctcttaggtggctctgggaatgggagaggggtaggatgtacaggggtagtttgttttagaaccagccgtattttacatgaagctgtataattaattgtcattatttttgttagcaaagattaaatgtgtcattggaagccatccctttttttacatttcatacaacagaaaccagaaaagcaatactgtttccattttaaggatatgattaatattattaatataataatgatgatgatgatgatgaaaactaaggatttttcaagagatctttctttccaaaacatttctggacagtacctgattgtattttttttttaaataaaagcacaagtacttttgagtttgttattttgctttgaattgttgagtctgaatttcaccaaagccaatcatttgaacaaagcggggaatgttgggataggaaaggtaagtagggatagtggtcaagtgggaggggtggaaaggagactaaagactgggagagagggaagcactttttttaaataaagttgaacacacttgggaaaagcttacaggccaggcctgtaatcccaacactttgggaggccaaggtgggaggatagcttaaccccaggagtttgagaccagcctgagcaacatagtgagaacttgtctctacagaaaaaaaaaaaaaaaaaaatttaattaggcaagcgtggtagtgcgcacctgtcgtcccagctactcaggaggctgaggtaggaaaatcactggagcccaggagttagaggttacagtgagctatgatcacactactgcactccagcctgggcaacagagggagaccctgtctctaaataaaaaaagaaaagaaaaaaaaagcttacaacttgagattcagcatcttgctcagtatttccaagactaatagattatggtttaaaagatgcttttatactcattttctaatgcaactcctagaaact

SEQ ID NO: 17 - DNA, 10762 bp, Homo sapiens
tcaaacccagtctcattcacacacaggcgccctcagccattcaccaccttgcacagcctctaccacacccgcacagagcacaaagtcacaggtttatacgcctatacaggatctcccataaacacacacgcacagagaagcagccacacagccacacaatctcaaagcgtcacacaatcacgaagtcgtgtacacttctagtgtcccactcgggtgtgcgtgcagaatcagaattgtttacaacctcataaatgtgtcaatcacacacaactccaggcgtatgctgagccgcacagtcccacgtggactcacaatgacaaagtcatgtgcaccctccggtagctctggttcataccacacacacaaaatcttaaaatcatgtacaacctcacacacaggcttagccccctaaccccaccccaccctagccacacaaaaagtcgcgggatcacccacgcatgacctcgctcgtgcccacgaccacagacggaatctcgctgttgctcctgcacgctccccctcccctgtgaccgccccccccgccccgcccttggtcccttggggccgggtagctgcctgaaggggcggggccattctctcagatataaggcttggaagccagcagctgcgactcccgagacccccccaccagaaggccatggtctccccacggatgtccgggctcctctcccagactgtgatcctagcgctcattttcctcccccaggtcagagccaggtgggaggtggcgtggaaagggatgaatgcggaggggaggggtgagtgcgacctgaaggtcctggggaaggagcgtggggcggacgggaagcctgggtcctcccggccgcctcaccctgcgcccgtctccgtcccagacacggcccgctggcgtcttcgagctgcagatccactctttcgggccgggtccaggccctggggccccgcggtccccctgcagcgcccggctcccctgccgcctcttcttcagagtctgcctgaagcctgggctctcagaggaggccgccgagtccccgtgcgccctgggcgcggcgctgagtgcgcgcggaccggtctacaccgagcagcccggagcgcccgcgcctgatctcccactgcccgacggcctcttgcaggtgcccttccgggacgcctggcctgtaagtgctgcccccgggggactcccggtgctggaggcctaaccctgccagcgaaacctccacctcctctcccctccagcttccaagaccctaatcctgcctcccagggggtggacgaaattcccagaccagtaactctaccgtctggaaccccacattcacagacctctaaactctacacactggggattctaaatgttctgattccccaaccctggatgctgggaccccaaattcccagaatttcaaacccaagctctgaaatcctaaactcaaggaaccctacctctgctccttggggatccctaaaaactgtggtcctcatctttatccccaaacctctcacaccttgtcttggggaccactaatatcttctctctctttttttttttttttctgtcctcagttctttcagttgggtcctgtattaattactctttcacctccaaaatcctgtctcccacccccacaacccaaaggcacaaagatgaacagacctgtattgcaatgcttgacccttgtccttttggacaagtgactgcctggtttccagcctcagtttcctaagcttaaaaatgggatcatcctggtacctcacaagggtcccttttgagcgattcaaccacatctcttgaataaagtgcttaccacgtagtaagtgctcaataaagcaagccacgtccagtcgctcacactgtaattccagcactttgggaggtctaggcaggaggatctcctgagcccggcagtttgagaccagtctcagtaacatagtgagacctcgtttctaaaaaaaaaaaaaaaacatagcagggcatggtgacatgcgcgtgtagtcccagctactggggaggctgaggtgggaggattgcttgagcctcggaggttgttgcagtgagccaagattgcgccagtgcactccagcctggttgacaaagtgagattctccccccccccccaaaaaaaagccacagatgtcattccctccctgggctggtctggtccctctgggaattgtcccttgcttgctcagtccccagcaatggccatcaccctccattcctgaactctggccttcattgagtacttaccctaaccactgtctttcatctttcatctcccccttccttcacccaaccagggcaccttctctttcatcatcgaaacctggagagaggagttaggagaccagattggaggtgagtgtcttcagtcttgggactggtggggagctggggcccacgtgagacacggggttggtggtgttatctataggtcttatgatgtcatcacagctcctgggatgtggtgctgagtgttgacagctccagggctcttggcatctcaggcacagaaatgtccctggtactggatgtagcagtggttctggtaccagacgaagtaggggaagctctcttactatcaaggctccagagcagagtgtagcatttcacagccctaccttatcatctgatgttgagagctcagggtgcgatatgaattacttctggttcttttatgtgaagttttttttttttctttccaagacagagtcttgctctgtcgtccaggctggagtgcaatggcatgatctcagctcactgcaacctctgccttctgggttcaagcaattcttctgcctcagcctcccaagtagctgggattacaggcacccaccaccacacctggctacttttttttgtatttttagtagagacaggatttcaccatgttgtccaggctggtcttgaactcctgacctcgtgattcacccaccttggcctcccagagtgttgagattacaggcatgagccaccacgctcggcccctatgtgaagctctgtcaccttgtccatgtggacatcccagggagccccgtgggatgttggagcttcaccaaggcgaatattgagcagaggttcctgggagggatacagggcattcctatcctcaacttgggagactctgttgctatgtaaggcccacagcgggggttttgtcaccattttttttcttgtttttattttttatggacatgggatcttgctatgttgcccaggctggtctcaaactcctaggctcaagcaatccacaggctttggcttcccaaaacgttgggattataggagtgagccacttcttcaccgttctgatgtagaaagctgtgtcacaatcttggggggtgacacctttgccttcaagaaagtgtcactctcccagtatcccaaggtctcaggtaatgtggtaacttatggtctagtaactggggtctctgtgactattttgatataggaagatccagaggcacaatttaggggtgttatgacctcacttcagacatgttattgttctttggccatatggaggtaccaaatgtcacagggtgttagaggtctcatcattacttcaatttacaaagatctgggtcaaggcccggcgcggtggctcacgcctgtaatcccagcactttgggaggccgaggcgggcggatcaggaggtcaggagattgagaccatcctggctaacatggtgaaaccctgtctctactaaaaatacaaaaaaaattagccgggcgtggtggcaggcgcctgtagtcccagctactcgggaggctgaggcaggagaatggcgtgaacccgggaggcggagctggcagtgagccgagatcacaccactacgctccagcctgggcgacagagtgagactccgtcgcaaaaaacaaacaaaaaaaaaacaaatatctgggtcaaaatacaggagtattacggtttctatgagataactgtttattttttatttttatttttttgagagggagtcttgctctgtcacccaggctggagtgcgatggccgatctcggctcactgcaacctccacttctgggtgcaagtgattctcctgcctcagcctcccgagtagatgggattacaggtgcgtgccaccacgcctggctaatttttttaaagaattttttatttttagtagagacggtttcaccatgttgatcaggctggtcttgacctcaggtggtccacccgtctcggcctcccaaagtgctgggatttcaggcttgagccaccatgcttggctgagagaaatgttacctagagtactagaaaggaccacgacattgcaggtcccagggtgcattggggagttcgcagccttgctaaagtagagggtgactgccattctactcgcgaggtccaaggaccccagggctccatgagggtgttttggcctcgctgggaggggcggggagaatgcggccggggcgctccgtatgcatccatgttcggccgggcccaccccagcacccctcctttgcctgtcctcgcagggcccgcctggagcctgctggcgcgcgtggctggcaggcggcgcttggcagccggaggcccgtgggcccgggacattcagcgcgcaggcgcctgggagctgcgcttctcgtaccgcgcgcgctgcgagccgcctgccgtcgggaccgcgtgcacgcgcctctgccgtccgcgcagcgccccctcgcggtgcggtccgggactgcgcccctgcgcaccgctcgaggacgaatgtgaggcgccgcgtgagtcctgcgttcgaccccaccccgtcccagccggggaccccggcccctcctgagcgtcactcgcggcccccagtcccctctcacaacccactcaccctcttcagggtactctagagtcccccaccatgtaccccaggcacccctcttcagggagctggggaacgcgctgactgctgcggatgtatcccaaaccccgcccaccatccagctgccaccttcggagaaactgaggaccctggacctctctccagccctgccttgctactcgagcccccttccctctcccagccctcttgttgccccaaatcggaagcccacgtccattttctatgctggcaccctccagttccttccctaacccacattcacaccctgtcctgatgctaggactccaaagctcttctaattctgcggccctcccgactcccactcggaagctttggaatctcctcccagtccactctggccaaggggccctccatcctccctccctagggttgcaggccagaacccatggcttcttaaagcttggaattcttcagacttctccccaaatttcagagccccaccaaggcccctaggactcccaggctaatccagatcttctcagagccaccctaattcaatacactcccatcttccctgaaaggccaggggtccccccaccaatcccaaatcccctcactgtctcctatcctcacgatctcacctgggtgcccctgtcccatcctctttccaagagcacagactccagcccgatggcctgggttcacatcatcactcctccacttcctaggtgggctggtcacctcgtctctgtgggcctcagtttccctatctgtaaactgggggggcggtcacagtaccatctagtcccgatgattatctgtcacaaagatgaagcaaggtggctcagggaacgtgctcagaaacctccctgctttccatcttgtccctggccctccccgacgttggtgttccctttctctctgcctctctgtcccccatagtggtgtgccgagcaggctgcagccctgagcatggcttctgtgaacagcccggtgaatgccgatgcctagagggctggactggacccctctgcacggtccctgtctccaccagcagctgcctcagccccaggggcccgtcctctgctaccaccggatgccttgtccctgggcctgggccctgtgacgggaacccgtgtgccaatggaggcagctgtagtgtcagtgtcacccttcccaccttgtcctgcttagtactttaccctgggagccacagccctctccctggggctccatgagacaccagcctggggaggagatctgggaataactatcagggaggtcttcctggaggcatccagccggcatctggggccttgaagtaggattaggtgatggggatgggactggggagagcaggctcagtgggtggccccgaaagatgcaggagtggaaatgatgaggagccgtgtggggccacagctgcccctactgcgggactgagaacgattcagggcccaaggtagtgggtggtggggccaaataggttggagatttgggatctgcgggcacagggggtggagacatcagagaaggcttcctggaggtggcccggggctggggcttctgggacgtgattagagagggtggccaggtgagtggcctgcagggagcaagggtgcagaggtggcagtgagtgagcctggcatggagtgctgggatagagtagggtccagtgtgggccacctggatactgccacactcagggttcaaatacttagggagaggccctgggaaggagagatccagagaagccttcctggaggaggtgggctgagatctaggacctcccagtaggactcgtcagtgtagacagaagcgagcagggcagaccaggcaggcagcatttggtaggcaaagatgtaggggtgggaatggggtcactctgggtccccagagcctcctccctctggggtcacatgggcagacagaagaatgtggagtggatcgaggggatgtcgggaggacctcccagggtggcccctgcatagtgggacttgagactggacaaggagcagcccccagtggttaggactgaggagggggatgggatttttctccaaggaaacacccttctcaagtactcttgtccctgcccaggagacacccaggtcctttgaatgcacctgcccgcgtgggttctacgggctgcggtgtgaggtgagcggggtgacatgtgcagatggaccctgcttcaacggcggcttgtgtgtcgggggtgcagaccctgactctgcctacatctgccactgcccacccggtttccaaggctccaactgtgagaagagggtggaccggtgcagcctgcagccatgccgcaatggtgaggcctggaggcctgaacggcgagggatggggtgggggtcctggatggctcagacagtccagggttggaatcctggctttgactcttctaaccctagggcctggggacctgaccttccacctgcaagcctgtaaaatgggcaaggagacattccctatctcataactattaatatttactgagaatttactgtgtgccaggccctattctaggcactgaggatacagcagggaatgaaacagacaaagtccctggccctgcctgatagagctgaggtgcctggtgtgctgaggataagcagggaagccagtgtggttatactgagatgaggtcagggaggtgactgaggcacatcttgtgggaccccctgggtcacaagaaggggaactttcacttttcccctgagtgagatggagccacaggaaggttctgaggagagaagagacctgatatcggtgctaaaagattaaatgcggcccggcacggcgactcacgcctgtaattccagcactttgggaggccgaggcgggcagatcacctgagctcaggagttggagaccagcccgggccacatggtgaaaccccgtctctactaaaaatacaaaaaattagccgggcgtgatggcaggtgcttgtaatcccagctactcgggaggctaaggcggaagaatcacttgaacccgggaggcggaggttgcagtgagccgagatcatgccactgcgctcccgcctgggcgacagagtgacactctgtctcaaaaaaaaaaaaaaaaaaaaaaaaaaaaaagattaagtaagatcatgaatgtaggctgaagcagagaattgcttgaactcgggaggcggaggttgcagtgagccgagatcgcgccactgcactccagcctggacgacagagcgagactccgtttcgaaaaaaaaaaaaaaaaagatcatgaatgtaaagggctggctgtgtatcttcttgcgagtgaatacaataattctctcccaaacactgagtgttcattctggggtgtgtggtactagggactcagcaccgaccaggacatctctgggccgcaccctcctgggggaaccagcccagaggggaagacagacaccctcagacagagcccagggtgggtggtcagggctgtgatgtaggagcacagggcagtgatcagggctgggatggaggaaggagcatcggagtagaaacctgaggggtgggctagggaagagaaaaggtgggaaaaaatgtgagaaaaggaggaagggaagagaggaggggtattctaggcagaggaaggccagagggttcaaacacgtagttctgggagctgtctactattgaagtatgatcgaagccgaaggaaaaagagacaagggcaccgagagccaaagaggtggagctgaattaattattccaaaacttcattaggaagaaaagcgagctggctttcctggcacactccaagacgctggcccttaagttagagagaaaaaggggaccccgtgcagcgatgacagagctgggaaacagcgcgggcaggtgggtccccggctcccggactgcgccctctgatgctcccttccccacaggcggactctgcctggacctgggccacgccctgcgctgccgctgccgcgccggcttcgcgggtcctcgctgcgagcacgacctggacgactgcgcgggccgcgcctgcgctaacggcggcacgtgtgtggagggcggcggcgcgcaccgctgctcctgcgcgctgggcttcggcggccgcgactgccgcgagcgcgcggacccgtgcgccgcgcgcccctgtgctcacggcggccgctgctacgcccacttctccggcctcgtctgcgcttgcgctcccggctacatgggagcgcggtgtgagttcccagtgcaccccgacggcgcaagcgccttgcccgcggccccgccgggcctcaggcccggggaccctcagcgctaccttttgcctccggctctgggactgctcgtggccgcgggcgtggccggcgctgcgctcttgctggtccacgtgcgccgccgtggccactcccaggatgctgggtctcgcttgctggctgggaccccggagccgtcagtccacgcactcccggatgcactcaacaacctaaggacgcaggagggttccggggatggtccgaggtgaggggctgcgccacagacgaacgccttgcgctgctggctgcttttacccatctccgtggtgcagttggcccgattccttgatgcatttccctggtcggtctctcttaccccggtagctggttttgggttcccctttgtgatgggtaggggaaaacaagatctgagaatttaaagagtctgagtttttcttctttctctcctcccacagctcgtccgtagattggaatcgccctgaagatgtagaccctcaagggatttatgtcatatctgctccttccatctacgctcgggaggtagcgacgccccttttccccccgctacacactgggcgcgctgggcagaggcagcacctgctttttccctacccttcctcgattctgtccgtgaaatgaattgggtagagtctctggaaggttttaagcccattttcagttctaacttactttcatcctattttgcatccctcttatcgttttgagctacctgccatcttctctttgaaaaacctatgggcttgaggaggtcacgatgccgactccgccagagcttttccactgattgtactcagcggggaggcaggggaggcagaggggcagcctctctaatgcttcctactcattttgtttctaggcctgacgcgtctcctccatccgcacctggagtcagagcgtggatttttgtatttgctcggtggtgcccagtctctgccccagaggctttggagttcaatcttgaaggggtgtctgggggaactttactgttgcaagttgtaaataatggttatttatatcctattttttctcaccccatctctctagaaacacctataaaggctattattgtgatcagttttgactaacgaggctgaatgctttgtatttgatgttggggctgaggggaagagattttgtctcctgaggagaatagtagacaggactctttatgttgtaggggtcggaaacgactcaaactgctttaaatataaaagaatttatggctgggtgcagtggctcacggctgtaatcccactgaaccactgagtgagatcagtgctgaagcaggaggattgcttgaggctgggagttggagagcagctgggcaacacagcgagacccctatacgaaaaattaaaacaaaattagccaggcctggtggcgcacctgtagttctacatacttgtgaggctgaggccgggaggatcgcctcagctcaggagtttgaggctgcagtgagctatgatcacaccactgcactaaagcctgggcaatacagcaagatcctgtctctttaaaaaaaaatgtattagtggccgggcgtggtggctcacccctgtaatcccagcactttgggaggctgaggtgggtggatcacctgaggtcgggagttggagactagcctggccagcatggcagaacctcatctctactaaaaaatacaaaaattagctgggtgcagcg

SEQ ID NO: 18 - DNA, 37477 bp, Homo sapiens
ggcaagcgcgccagcctcgccgccgcctctgccgccagcagagcgctctgggcggctcgctcgcgggaagcgggccgaactcccggcgggcaggcaggccctcctcccggggcgaaagccgcagctgacgcaggcggttcggaaggcggaagctgccccgctccgaccgctcagtcagcgccgcggcgcctacacctggggccccgacgcgcgggcaaaggcgcacggcccggggcgcccgagggggcggtccccgctgggggcctccaggcgtccctgagcaacgatcccttccaagtacctccccgcactctcccttccctcctggcccgaagctcccgagggcgggggttggtgtggggccctggttcttctacgccgccctgagcatcccgctgcccccaaccccttccaagttcctcctcgcactaccccctccccagcaacgtgaaggggaggggcgtgcccagggtgagcacgccctctcatgaatattaataagcgcgcatgcgccctgcccggcgtgctgggtagaggtggccagccccggccgctgctgccagacgggctctccgggtccttctccgagagccgggcgggcacgcgtcattgtgttacctgcggccggcccgcgagctaggctggtttttttttttctcccctccctcccccctttttccatgcagctgatctaaaagggaataaaaggctgcgcataatcataataataaaagaaggggagcgcgagagaaggaaagaaagccgggaggtggaagaggagggggagcgtctcaaagaagcgatcagaataataaaaggaggccgggctctttgccttctggaacgggccgctcttgaaagggcttttgaaaagtggtgttgttttccagtcgtgcatgctccaatcggcggagtatattagagccgggacgcggcggccgcaggggcagcggcgacggcagcaccggcggcagcaccagcgcgaacagcagcggcggcgtcccgagtgcccgcggcgcgcggcgcagcgatgcgttccccacggacgcgcggccggtccgggcgccccctaagcctcctgctcgccctgctctgtgccctgcgagccaaggtaggagcccttctccgggcctccctcccagccgtcctctccctcccctcgcggcgccctgggcggttgagccccgcgagcaggctcggcagccctcgagcgcccgactcctcgcccctgcgcccgagcggctgcacctgggctgagcgcgccaactcccccacgggagcccctgcctcctgagggtgacccctccaggccggacaggggcgcgttcgctccgctgttgccccccgggaagtcgtcggatttcttccgcactcgtgcatttttttttttttttgccccggaatcatgttgagtccttgaacgtagtttcgcaaaattattttcactcggcgaggagggctcgtcggggcggggagtgggagggagtcgccacctctatactcgaagaaaacagctttctcccgcgctgacctacctccttccctcgccggcaggtgtgtggggcctcgggtcagttcgagttggagatcctgtccatgcagaacgtgaacggggagctgcagaacgggaactgctgcggcggcgcccggaacccgggagaccgcaagtgcacccgcgacgagtgtgacacatacttcaaagtgtgcctcaaggagtatcagtcccgcgtcacggccggggggccctgcagcttcggctcagggtccacgcctgtcatcgggggcaacaccttcaacctcaaggccagccgcggcaacgaccgcaaccgcatcgtgctgcctttcagtttcgcctggccggtgagtgactactcgggaaggaggccgggcggagcctcacacccgcgcctggccgagccctgttatcccttgcgagagggatttaaagggctttggcttgaaactaggcgctaactggggaaatctctaggggtggcgggtgagggagccgggacactatagttagatctcggctggggtagtcgaggtgggtcccattcctgctgctatttgcttagtgcacaaaagtggggatcccagagggtttatgggaccaggctcctaggaaggccggtgtaaacttgcaacttgaagttcccagagtaactctcccggccccaagccaagagatcgttgtagctgatctctttgcttaactaattaaacctggtgcgccgtggaaggcgactcggcgcagttctggcctgcgaacgccgtccaaattggcaacctcccctttcccgtgaacggccgggagggcgggtgtgtccttcctggagggtgtgggggagtccgtttcccgctgctccccgggagattttagtgtgtgcgggggcgctctccaggttcggcttaagggccgggggcggccgccgcaggaggaggttcttggggccctcacaggagctgtagacctgggaacccccgcccgctgctggccccttcctgcccccgcccccgagtggtgtagctcttgtggcctcacttccagcggttcccgggctctggaacagctgtgtttgcagacttccccgggaagggcgggtgcacggcccccgcaagccttcgggggccgtgccaaggcttggaaggggtggtcttctggaggtagtgcctgagggtgtaagtgataggccctcatccccccgccccattccgcccccaaaggagctcgaggcccgggcccagctggcagatcctgcagcgaggcccttgcaacatcccaaaatgggtggaaggaagatgggtgcgattgcagaaggggaggaaagggaaatgttgggggtgtgccctctgcctggctcctgctgtccaggaggcatgactcattgccaagactggggcttggcctagcctgtgctgggagggtgggtggtgagagggggagctcggtgccccagagcattgctttccaccacgtgctctaatggggtgcactctgctgcctcctgtccgccggcttaggttgtgattctgggaggagacagaggggagactatctggctgtgtctgtgtatgaagcttggggtggctcttaaaatccacgattacaggagctggcattataaagtgccctctgctgtgggtgagataagacagttatcaaaaactgccatgaaaaggggtttataaaaagaaaaattaaaaccaacgctgtctgtgaagctctcttgaggtccaagggctgtttctgttgtgggatttcatttttaccaagagtatttatcttgtttgttaatcccctattagggagaactttaagctaaagagtctggctgcgtttaaatctggctggcccaagctgactgtgaatactcaaactgcccttgaacgtgtgtttggagtttagggggaaggggcctgcaggtggttccaccctcctgccggaggatctgtctggagcccctcgcttttcacaagaccataaaaggaatcttattagtgatgtggaaaagcagcagcctggctgaggctcattttggagagtagggtcagagggatggctaacatgaaaacaaggaggcttgctccctcgctggccaaggaaaagtgacctagaaaagtgcgtctgtccgcttttgacacttggtcagagtcctcaatggaaaacgagcggaaatagtgtgggagggtaggagaggcgattgatttgcatttgctggtgctcttctgtggtttcaggccccacgggtcaccaaccatgaaatagactctcggcttttctcgaatgggggaagaccgatggggcaccactgaaaatgtggttcttttgaagttgggacaaacgcatgtatcactcataaacaagtctccaccctgatgccccagaaaggcctgctgtgaaacataagatttaattctcaagagaaattggagtttaggtgtatttgtttttctgtatgtggttggagaaacggcacagtccgtaactttcaagaatgattccaggctgagtagaaacgtaactgaaacacttaagtagctgagcgagtatttaactagagggcacagcttcatttagtttggcaattaactatgtcttttaaaactgatttccttgaatgggaaataaatgaacttagtacagaattcaagagatagcaagaaaaggatatatggttaaaaacaaaacaaaactccaaaccaccttgggctcccaacccctagcaggcacaattaccatttgcatgagtcctcccaaatttgctgacgctgggtatcagcaaagggtgcaggggtaggtcagtgtagaaggtcatgtagttcatgctttttgtttggaattatgacccctatccaagcaactgttcatgttctagagaggacgaggaggaaacgatttggtcagatatgaaatacagtccatgttctggtgtgcatgtgaaaggctttgtagaggtggcccttcctgtcatatatcatatctgagtatgtcccacgtggtgtcccctgccccggctctggtcttggggtagtttttcaccactggcttctaattctcatactgttgctgctctaaggggcttaacttgcagcaactatctggattaatgattctcaaattgggggaccaagtgataagaaccattattgtgggaagtaattgggcttaacaggaaataatttaggaattaccacttataaatcactgaaacggttaatctgtacctcccaaaattagtgctaaatcccagtagtgcctgcttattaaaaatacattagtgtaattaccactactcatctccaaaagctttttgggaacttcagaaccccagttagctgtattgctgcatcggtggccccagagtgaaatgaatctagagaaacgttaggggaagaaattggggtatctggcttattagcctcatatttaaattccattgatcctattaaaagacttgctgagatcaactttttttttttttttttttttttttttttttttttttttttggaaaatccaatgaaacgtgattcttctgtgtgagggatgccagctttggcccccttcatgcttcaggcctgaatgaccaattgccacgatgctaatcacagaatgtaattgacaggcccttacttttatgccttttgctgtcttttccagtccctgagcttctgtagatatggtgtgggcacatggagggcttaaggatggggttctgatttgacctgcctcctttctgcagccaggatttgcatcctgcccgtgtagtcagcatgtatacaaagaaagagcatgtgtgtacgtatgtgctcagagcaagggactttctgcatgtggagaaaacgccttttgccctaagaagtctacctcaaaccaaagggatgaagtgatgtatctgtgttgcaacactgggcttgggggaaagtgaagctgtgcttgctttgaaagagctgtgctaagtatctgcagaatagctgctccaaaaatggaatctttattccaggtacttggtttctaatttttttttctcttgcaggtgtaaccttctgtgttttctttctccttgttgtcttgtttcttagcaacttattcaaacctccagtacttataggaatttgcaacccaccagttccacacccgtaattctacagggacttaagatgtttttagaaaacggtgaaactttggcgtggaggctcttgggggagttcagtgggttaaaaggagagtcagcagcaacttacaggcatgcaacctcccagaaaatcagcaatctaagtgctgctcaaaatcttcacaccaaatagtggtgcctttggggaccttttagatagaagacgtggaaagtttagcatggagaaaaaagttacttaaaaaaaaaaaaacagtgtcaaggtaacaaggagccttcacagttcctgatctgaaaacaggaatgtgaaccagaggccttggctggattcatatcacccactggccccattgtagaagggccagaagttggtcccaatgtccggctttcaaggttagtgacaatgtaagaatgcatgatctctggatgtgcatacaattagcgttgtaatccataaatgcaaatactcctgcaaattcttccatggtaaacttctgtaaggcatgttgctcttccacctacccccatccttcaagcctaggatctaggctgctgagagaagtgactcttggcttcagcttttaaatatatatatatctctcaaaacttaatcttttcttccaactgttggaagatacattgggatgaatggaaagtggtgattctaaaatggtggtggaaatggaggagggtcctgggttcagaaaaatcccacctttactttggtgcatggcactgggtggctgtgttgtgacttctttgctgatttctgattaccgcatggaccacagcagccctgtgactgctgttttttttttttttttttttttttatggtgccagtgacatctaccattggtgcagtgcgtgtgctgggaagaaattccgcaaggtggctcccagtagttaaaggagtacataaatagtcaaacatgcagagtcctctaccagctcaacccagtttttatgcacttttggtaaataaacagaaaggcttcttgttcaggcttgctctgtgtgaaccagaccgttgtgcttggctggcttcttggtattctatctattaacctcgccacccttttgtaactggtgcatttaattatcagtgggatgcttttcaaacaggtaagggtaatgatgggaaagggggtggggatgtctcattgagagtcacaaatctggatatgagctttggggccccttggtgagcctttgagtgggctttgatgagaaaatcaccctttgtaaccagatcggactctattgacatgtcaagccctacagacttgattgctttctgtgcctgaagtcttagcctagatgctataggatagttgtcctttcttatctcactttcccaaaacccactcgcattgtgtgcatgagtacgtgtgcatgcgccacacatggactccctgcaaccttttctgcttaatatgttttgtgactggaatattttatactctggccacccagacacaggcaggacaatagagttggccgaattgactgaaatgaggattatggagaataatagggcctctccaaaaataatgctaacacaggacaagcgacaggaagcaacagttgagtcagcagagctcagggcccctgacgaaccctgggagccgactgactgtgcacaatggccgcgttggcacgtcgggcattcccaggatgtgcgtgccgccggcgggcctgcctgtcgcagcagcctggggttttggacgccgcacgcgtgccgtttggatggcggtttatttgtgtccgtcagcttggcaggaggggaggcagccgcttctcagggcttggtttggctgtcactgttgccaggaaaaggaagctcccggctgccaacacaattacctttgtttcttacatccccccttcttaatgtggcaattaagtgcttaccgctctgcccagtgccaaggtaaccgccatggagtgggacagggcagagaacacaaccttggcacagcagcctaagtgtggagggcgggaggaggtgcaggggccccagccttgctgggaacctggtggcccttggatgccttggggctttgatgccaggactctcctctaggtagaattccacagaaatcttccaaaaagcaattccgaaggctgaccattcctctttgatgccacaccagaatgggaaccagctgccaggtttccagatttccttgggcttggagctgggaaggggctgaagtgactcactttgcaaatccagactaaagatctgtttgctacccctccttcctgtgtggccttcacagtactgttctggaaaacataaggaaagatgaaagccaggtgactcttcggcagagtcttagttctgtagtctgaaatcaagaaaaacccaggtatttgcttttgttgttgttgttttgctgtataaacttaagtttgaacacttgcctttccaagccctcctgggatggaggactccgcctctactgggggtcagagttgcagtggctgcttgtatgtgacttcggcatagtggatttgctgctctgtggcctggtccctgctttgatgtggggtgcatgatctgggatctcagtgcctgggtgtatgttcagggatgtacagaggtcaagtgtgggcctgggaaaaattaaagttctctagcaactaataatcattgttaaattatcttgattgctgatctatagtgtggggatggagtgggaggttgagtgcctcctaataggaaccttggagggaatcctttttctctgtagggctgggcaggaggaatcctcctgccccaggagaccctaatcccctccctgaaacagacaggaaaaaaagtccaggctttgttgccgtcactgtagctccctgccctcaccctgtctctgcctctgagaaagaagggcagttcatggaaaatcacagagccaggcacgtagggctgtgtgcaattcttttctctccaggtggggtgatgtcggtcagcaacttctgaggttttcccagttctggcgaggatgagcctggtagactgcttggtcgtccaagttcttgtgcaagacctaaggatgctttcctctttgagtattaaactgagttagtactgccatgccagctcagtcccggcaccttcccttgcagtggggtttgtgggtattatgtgtttagcgcttgtgcaagtctgtcaaaactcctggtatcaatgcatttaatcagaggattaattacaacaatactgttgaagtggaggacgtgggcctcaacgtgaccagcaaatgaagggcttaattatacagaatcagccacacatctggcctcattttgactgtgctcttacctcaaatcagtagagaaatataatttcttgctgctcttagggaagagtcctgtaatttgcaggaagtcctaagaaacttaaagaggcagtaaataaggtataactttcgctaataaaatagtaacaacagcaatgaatttggacctgtggccactaacaggagagggctgggtatgtgccctggcttgcccggttttgcttgcttttctgagcattttcccacagttatcagtgaacgaaatggaatcctactctgctttgagtatgaaacatatttcggctgaattccaaggcagggtctatcacaagatatttttatattcagagatgacctgctgtgtcactctgagagcgctaagctggccttgagttatgaatgaaactcccttttaccctccctttttctctttttcctttatcttataggtgctttctcttctcttggcagcagtgtgcttctggtggcacagcacggtattatttaatctatacacgcttctatttcctatggcttggtttctgacacagcaaagcagggattcataacctagttcatgttccttgtctaccccacctgccttgagtacatttcttcagtgccaagatagcagaagcttcatttaaacgctggtgttttgtgagactgaccttactgtaaattacgaaggaaaattttagaaaaggagggaatttgctaatagcttaggtttggctgggggtggggaggtggaattctgagataagcttggaagataaaaggtgccttcagtttaacagctggcatcttgccagtatccagggaatttgtttagttagtagactctgattattcttggaatgttagatcttattaacagataagttcatcaataaatataacccatgggtgtgcggttgtttctccctttgtactttcttccctgggatctgcccccaactccaccgcccaagtgaggttgacttctttgtcttgcagagtcactttgcatctaccccctcctgtttcctagagttacccgatacttgtgggagccaggatggtctcacatagacagagttttcaaaggggttctaaaaaggaaaagggggcctccctagagactgcctcaccagggcccaaagtgtaaccttagcaataccccctcggtacaaatacctggttaggttagcttagaataaattctttgtgtgtgtgtgtgtgtgtgtgtgtgtgtgtgtgtgtgtttcctcatgcactagggtcagggtctggaaagttttgggaaactatatgctaaatactctcatatcatatagtgaggtggcatttcctgatctcaactttgagctgcctgcatgcatgttgactccagtgcgtccctgccaggtgaaaggagtcatttgtcaacctgggaagagtgctgacaaaggaaggggagttggtttggatttaaacatccaggaactcaatgcaacaaccaacagaatttttattttggcattatggttttgtttggtggggtattctgggaggccaagaatgtacgagattttggaaagtcgaccctgtttctgaattgctaaattgtttgtttgtcttgcagaggtcctatacgttgcttgtggaggcgtgggattccagtaatgacaccgttcgtaagtatcgcttctgtggacttttctctaaacacacgtggaagtgtggggcttggccaaccagttggagctggatctgtctccttagtacttagcatttctgccacctcttgccttctgttctcccctgtaccccagggtgaaccttcagtggaatgtattccttaacttttctaggatttttgcttggaatattaagtggccagaacagaatcccagttaactcattccctgattatgaaacctagattatcttcgggatagagatcttaatggttttacaactttaaaaccttgtagtctgctaaaggatcaaagtagtgactttttaaaagtccatttaaactttaagtgagtgtttaatctctcatcagaaagataaagccataaaggtggtgctgggctctagagaccgaccttgaatttcacttggtgggcaggtgagcttctagtctctccgggtttcccacactgctccacaaacctttcattgaagcgcaattccagagcttcacagccattacctgccttgtccctttctgaaagatggctctgttttcagtgcaggttgcctttcaggactgaggggttggttttggtggataagccatggaggatgtgattgaaatgacatagtctggcttacaaagtagtcttgctctttaattgtaactttacagtgttttcgctcacgagccgaaacttcaagttccctttttgccagcagagtttgggttgcggtcgctggaaaacttgatgctcactgaaatctcttggtctgtgcatgaggaagagtggatccagcttcttgtcttggctctctgttctctgaatgccttgtactttttgcttttctatcttaccatttttttttgtttgctttcactgtgaataatatattttcatctttccttgccttgcttttttttgctgacagaaaatggtgaatgcacaccgtgggtgcagtgagggcttggtgcctgctacgtgggcagcttccacctgtggctggcttattgggctacttggagccacagaatcattgctgagctccgatgtgccagagagtcccaggccatttgggtcactcttctagcttgggaatcttaagtccagctttttggatgtcatcctccctggagggggagctcatgaaagtccaaggttcgagtcttcctccccagagggctaccctgtaatgccgtgggggggtgtgtgtgggggtggcagggaagctctgtcagccttggctatggctgatgccagtcagggtcatagacacctgtttgttctcccctccctgccacaaacgttgaggactgtgaacattatgtcactgtgacctgcttacaatggtaactaagcgttaggcagaaggggttgaggaggggggagacataggctcttctgtaatagtatggtgtcgacatggtgttctttcccctcccttttagctattgaaacaatccacccggtagagtgaacagcttgaggttgatcctggcctgtgataagagccaggtcagtatacttgttagggacatgtgagagacctccccgccacactgcagcattcacagcacctttcctggacctcctgtcacctcgcaggtcagggagttatgtcccctgggaacccagggcttgtccagagctacccacagttgtctgcatttccaggtagcccgattttggggttctaggatgtttcatctcctgggggggtaatcaaatccctggaagaggacaagaaagactgaggtaggaataaagttcttttaaacctcaagggtgcccattgcaggttatcaaaactcacttggtgaaccctgaagagggagatgggtttggtggaaatggtttctccacttgcctatttggcctcttttatgatgcttccaaggaatcttgaattcagcacagtcaaaaccaaactcaggatcttctcttgccaaaagcagtcccttcccagggccccttctgggtgtctggcaccgatatttgaacactcattgccataagccagaaatatagaaggcgatctgtgtaccccctctctgttagcatccatacctagtccacctccaagttctgaaaaatctctccagctcttcacttgaatctgcctgccttctgccactgccctggtccaagtcaccatctgctcatgactgaacttagagtagccttcgtctggtccacctttatctgctctgactcacctctagtgctttctccattcttctgccatcctggtcttttcagagccataacatttgcttgtcacccttattatgaaaaaccaaccacttggtggccttctgttgctcttgggacagatcttcatgtggcccacaaggctctgtgcagcccagctttgtctccctgccagccttgtcttacacaccgtgttgtccatcgtatctgtagcctggccataccctagcagttgccttcctatcctcaactacatcacatgctttctggcctcaggacctttgcacatgctgtttatgctacttggagtgttttgttcctttcttcaccctcagccactccctctggactgcactccacagggcagaagctgaggatgttcagaagcccaaacggagttggctgccctgtgggacccaagcgagttgtaaacattctggcttcagatgtaaatcaaaggcagagccctgagttttagggcagagaattccttctatcagctctgcagtgagccctcacaggcagactcgggcccaaatatagcctaggtgctgtttatgtatttgaaagtatttaaggctggtccttctgtcatcggtcctccaaagtcttttattacattttgggactgtggtatatagagttccaaatttctttctcccctagagcaaatggtttcagtttactgtaatgcataataaacatgtaaacataaataggcacacttcagaccaggttttccctgtagcttagctttctcggctaaggcccccttccaggtttttgggtcggtgtggtcccaggttatgctcagactcgcccttcatcacctcctccttggcctgcgaggcggtcatggcttcttcgtgactcatcttcgtggcactggggattgcagggaggcatggtgatgtccttttccagtcacaaggctggactgccaaacgaactgccacagattcctttccagtgccccaagctgaaggaaagcgtgatcaggaagcaggcagcagacgtatttgaacccagacatgctcgaccccctccctgagcaggtgtgaaattatgtatgcagctccatagctccactgaggattctgaagtgatcctctgcacgacacttcccggaaataagtggaaagcttactgcatgactgaaaagtacatatcagtcctgcacccctaggattgccctggactcttgtctaaactgtttgttgttgataccagcctcagaagctggatgcctttaagccatggctagtgtgtttaaccgatcccttttatgaagatcttgtaagcgcgtggtaatagcccactatgctttttaactgaaccagcagagcaaacatagttaatggagagacatttttgtcattccttggcctctgtttatttgcaaaaacgagtaaagtgttacctgcctgcaagtggttcagtgcgtgccggggtgtcaggctgcaggtatgtgagcttgttcaaggcttgtcttgcccacgcagcagtttgagagccctagagggcgaacgctggggccctgttggaagcggtgtgtggatgaagccacccaggagtcccttctctcctggtcacttatagggcttgcatcactttttaaaggagcactggcccgaggcctagaaaaacagccatgtgggtgggtaagaatcacaaagacattgcaagtcagtcctaactgtctctccaagatggtcttgaatttgacaaggtgatgaagagttggtgctggcaggtttaagaaaacaaacacaaaaccaggttggggtgctgatttagtgccttgctgccttttcagatccctcccctgaactgctggcacctgatgtttgagctatttttgtacctgtctcttctcaaactagatgataagtggcctcagggcagggactacatactcctgagagctgcttgagctcgaggtgtttattatcctcagtaagcattttttttcaggagcatgacttggctcaaaaaaacaaaaagaaaaaagaaaccctcccctcaatttacctgtgtctaaactttggtgaattattctcccatctgccttctgggcagaggagaaaggtggaatgcatcaagttcaaggtcttggtatttaagagctggctttaaaggttgccatgttaacaattgtaaaaaaaaaaaaaaaaaaaaaaaaaaaagtaacttaatcgtctccttggcttccagttaagagttttgaaatggacaaaaagcttttctgagcaagacataaaaccctaaaaccagaaatgattgctgacctttatctggaataatgaaatttcttcaagagcaacattccatagggagctactgtctctcatatgtaaagagcacttgcaagtcagtatggcaatgtaatagaaaagttggcagagaagagaagctgttgctgttcacaggaacaaatataaatggttttgtaactaccagaaagggctcttgccatcacttagttaaatgctaattaaatgagatacctctttacctatcaggcatagattagaaggtttgataatgtacaacgttggcagtgttattgggaaacacagcttcctgggtggtgggaggacagactggtagtttgagactgtggacagaggttgatttgttgtgcacggactctgattcagcacttccatttctagagtatctcattgtgggaaccatacacaggcagatacgttcaaggaatgctcactgtggctttgtttaatagtaagaagcccaaacgactcacatgcacacatgtcagggactaggtaaattatttattggtgtttccagacaatgaaatactgtgtacccattaaagaaggtaaacaagtggtaacaggttgtctctgggtaggggcataaacttttcatttctttgccttttttacaacagatagaattttgtagcaggtgcatatgtttttattttaaaaagccaaaatggtcagggaagaaggctgcaatgtgaatattaacatgattcatcactttgtctctagaacctgacagtattattgaaaaggcttctcactcgggcatgatcaaccccagccggcagtggcagacgctgaagcagaacacgggcgttgcccactttgagtatcagatccgcgtgacctgtgatgactactactatggctttggctgcaataagttctgccgccccagagatgacttctttggacactatgcctgtgaccagaatggcaacaaaacttgcatggaaggctggatgggccccgaatgtaacagaggtatgtgtgtgtgtgtgcatgtgcacgtgtgcctgttgcttttagtgtccatttatcaccccaccagcaggcaggtggcatgcggctatctcaggtggggtgggattttggctgttattctgggcctgcagtatgaagatgcggagtgtagaagatgctgttggtgccccatccagatcccctttactggcatccccatcccccaggtgctgtgttggctgccaacagctcacagctgctccttctcaggagactcgtccttggccaaaccagtgcatgccccattcctccagctcacagtcagtgattgacagacatagggctacaaagcccagcttcctttgccttaaaacagtagtacaatttgcactctagagcttaccctgggattaggctgaaatcagactccagttgagaccatgttcttgctcagctctttcccctaccccatctgcttccctcaattccttctacctatgtccagatccccttctcagactctgcttctaaggaacttgacccaaaatagatccagacaggactaggtcagcccagttgttgtctgaacaggctatcctataggaaatgatagcccctgcattcagggtagccttgcagcaagttttcactaggtgtctttgggggcatggctttgatggggagaggtatgtggttagctcaagctttcctattggtgtaggagtgggcccacttttagtctctgtgctgtctactgtcccagtccctttatagaattcagtgattccaattcatagcaacttgatgggtaattctgttaactgtataatatcccctcatgagcaataatgtactctgcttattttacatgataattaggtaaattgttttgatagactcaatttcaaagtgagtttttcaaccatgagagaggggtgggtcatgggggaaggaatttacagctctcccgggtagtactactgctttcttaaataattggagagaagagtttaaaaaggatggcatttctggaattcaaatgaaaaggggaattcattaacatattttagtgtgttttaaaaattaaacgacctaacacttagtgtgggttttttgtttggtgtttttttttttttttaagataaggtgctcactttgtcacccatgatggcacaatcatggctcactggagccttgaactcctgggttcaagtgatcctcctgcctcagcctcccaagtagctgggactataggcacatgccaccacacccagcttttttattttgtgtagacatagtcttgctatgttgttgaggctggtctcgaactcctggcctcaagctatccttctgcctcaatctcccaaagtgttgggattataggcatgggccactgttgcctggtcttagaaactgacattttttagaagttacttttttcttttttttaaacgaagtagagaattgctctgcaaggatactttataaaagtctcaccagatctggccaccagattagcctgcccaatgagtccagcctggctggctctgttagtcccatggaattttcaaaccaggcatttggtatgggttgtttttttttttttttttttttttaaaggctgaggctcatctgaatgtgtcctggtgggatggggaaggattatctatacctttttttcttctaatgaaaagggtgtgggcagaatggaaactgaccaagctctgctcaaggagccagggtagctgtggtttagagaggctggacgaaggtcccccttccctcgtcaacttgtctgcattttgtccccaaacaatatcatgttttcagaatctgctaacaaggccttgaagtttaaagctggttttgttatttgggcccctcccatcttcctctccttacaagggacttgatatgagacctgttaaaatcgtggaatttgcagactttaatgcaatgggccattctcatgaccggggcgatgcaaggaacaggcagtgtgctgacacgcccttctctgttttttacagctatttgccgacaaggctgcagtcctaagcatgggtcttgcaaactcccaggtgactgcaggtaaatcaactggtcttttgtgagatttcttttaattttcctttatgtaagagaggaactgactttattgtgactatgcctcttttttccttggagaacaagaaagcttttttaaaaaaaaaattcagatagacacatccgaagcttattaaattataccagctgtctggtggaatgcacacaccacttctctcttggaataaaaagaaactctttgggcatagccagtgacttcatgtattaactgttctgtaaattgataacacatttttataatcttcccttatagtgctgatgggctagatggagggatgtgggcttgtttctttgcgtctctctcctcttccaccaaggctttcttctcccagccccctccccgacttttcccatcaataggcgaaagtccagcattctttagaatgggattagtccaatctcctggcccctttgcaggcgggagctgggttggtgctgagaggttaatggctgccctggaatcttgtcagttgagcctgatgaatgtagacttttgctgcagtcctttgaagtctgttcctttatggtccaggaacaatgcggaagccaaagggaggcctgccctgaccacttcacgatggcgggttttggaacttcttgaaatttatattacgcccgtttggaaaaggcttattttgggaaatattgttggtgtctgtggtgtttttggcagtcttaatgctttgctctccctcctcccaaattttaaggagtaacgctaaatggatcctttgagcctgtcacttttgcccccaaagctactctgacatgagtaaagggaatcttatgaaacatagtctaaaccagtatgtcccaaactaatgttatttggggctcttattaaaacgcaggtcctgattctataggtctgggctgagcccaggtttctgcatttctaacaagctcccaagcgatgctgctgatggaaccatcagcaatcactgcccccagacctcagtactcaaagtgtaacttccagaattaacaagggagctgttaaaatgcaggttcgtgggctccgtcccacatccatagaatcctagtccttggtttggcccaggagtctgcatttgacaagctggccacatgactttgctgcttagtaaattttgaggctactcctttaaagagaactatctgtggcctttacctttatgattccaccgctccgtctgttcccctcccatgcaagggggaacatggaactaaattaagaactggttgtcccgaattgtctcttcctacacttcagaaagatagtttatttcctggaaggctgaggggcttctcctgctgtctcccattggtggcgatggactgtagtatttaacagcattgctgtccaatgcggagcaggaatccacctaccttaactcttcctaattaagggtgttctggagaaagtcccaatggcagtgctattagtgattccaagcctgctgcctgctcagatggatatcagcggaggccgactgtgatttgtgctgctgtcatcagaacacacatacagctatacaggggagggccctcccagccagaacaacaggctttgtttccagaatttagccctttctctttcgaagtcccacctccctctccctgcccagacacgcactgatggccttatttacttaaggtgcgactttcccacacatcatttgcatagtctcccagcccagttttccctccctaccttgaaagaaagtcaaaacagaaccttcacgctgaggaagttcaggttgtgtcctgctgcagaaatagttgaatggcaagttacctgcaagttgtcttttggattatgtattacacaggttattttttttttcacccccacatgagaaaatttactggtttttgttgttcccaagtagactgagtccctttccctgggtatacatgcttgcttattgcaagcctgccaataatatcaaacttaattatgaatcatcatctgaggaaagtcacttcaatttctcatgagaatcttaatcatatattattaaactgggataacttggttggtgcctcttttagggtcagtatttttatttgttttcttttgaagtcatccatggcctcttgtggttgcttttttatgcttggggattgaggtctctttaattaggtgaggttgggtcctcagctgcctctccttgcctttatgaggcaacttgaagagggctagtgatcctgaatttggaagagaataagggaagacggtgagaatattgccatttcgtaatcagttccctcttactatctttcaggctaagaatatcagccttgacagaatggctacacccttacctcccactaacgtgggtgtccgcttttgagaaattatttagattgtaattttgttcttatcttactcctttagtcacttgtcacgttgacattccattttacataaaccagaatccagtgtctaactttaaaccacacattctagtgatttctttgcatgtgggtgtgcatagcttggtttcagaagttaggaagtggttagtcagtattctcaggggttaagttgactctcagccgtgggtgattagctattagctagatccctataattttcccatgacaaggatttgctagcctgcctcccgctcttgggaaaccgaaagcctttccttctggggagctagagggggcgggggttgttttccagagttacagctgagcagcttagggggttggcgctgatcgtggcttttcccaggtcccgttctggaaacatgttgcccatcccacccgcaccccaccctccaccctccaccctccacgctccaccgggaggctagttgatgtttctccctgccttcccccacccttgttaaagcttggctcttgagaaggcaattaaagtttcagagggcttgaaaattcaagggagagtggtttgagacgctgccccctctcccaccccagatgaaagttgttgtatttgtttttgtttttgcttggggatcagaggcactatttggccccaaaagagtatgattaatcaaggtgcttatataaaagaacctcaactccgccaatactagataaattaagcagactgctttcttttttttttcttttcttggcaaagcaagaaatcactataaattagcacacagtaatgggacacaaattatggagttggttccaagtgttgtcatttccttctccttccctatagaagtgggtttagagagcctactctggctttggccaagggagggtgcccctttctctccttgtttttttaaataaagcgtcatcgtgaggcagtttcctgctgcacttggtggcttgttgcatttctgtgcactggggtcatgactttctgtgcagacaaagagcagagtggcaagtgcagcgtctgcagagactttggcatagctctcttgtcaccgagagagtcctttcctctatagtctgtcgcaactaggtgcacgggttgatttattccatgccttcacctttggctcactcgtgtgagcctgagaagagagtggctttgtgaagggcatccccatgctggcctcttcccaaacagccctccttttgtcaggagtcggctgggaggggacctcagctcaactgtgaaaatgtttgtttatacggagcccctgatgagccttgggagtctaccttcctgtccccagaaacaaaacagaaaaagcctggactttgcagtcttccatttgaattgtacaggtgtctcttaacgttcaaaaggctaacctggaggtgtgctgtgtgtctccaggtgccagtacggctggcaaggcctgtactgtgataagtgcatcccacacccgggatgcgtccacggcatctgtaatgagccctggcagtgcctctgtgagaccaactggggcggccagctctgtgacaaaggtatggcccttagggatgagacccagggtgggatctgggggtgggatggcactaatttggtttctaattttattggcaggggcttttattctgaattctccttgaatgctgtgtgggttttctggtttttctttttaaaagacgactggggctagaaacatggtgggttcgccatcttcacaggcgtctcttagtgactccaggatctttttggcagatctcaattactgtgggactcatcagccgtgtctcaacgggggaacttgtagcaacacaggccctgacaaatatcagtgttcctgccctgaggggtattcaggacccaactgtgaaattggtaagtggtccaagatgaatgagagccctttgtctaatttttctgtactcagcttttaaaaaatatacttaaggacttgtttaaggaaaaaaaagtgaaaatagcttccaaagataggccttatcccaaccattctataagcctttgtaactttcaagtctctaaagttttttgggtgatgctgattcgtataggaggcagcgggagatgaaatgaccccagctctgagatgtcttggaatgtggttagagacagctcagcgagaaagatgacttcctttctttcctagacacagcagggttctatcacacgcttgcttttggtttttgaaatatgcttgcactagtggctgtggtgtgggattcggttggaggggggtgtggggaggtaacggtgtgcaggcatccctctctgactgccatcctggtttttgcagctgagcacgcctgcctctctgatccctgtcacaacagaggcagctgtaaggagacctccctgggctttgagtgtgagtgttccccaggctggaccggccccacatgctctacaagtaagtccaattttcagcctgtgtccattctaaggatccttgtgccaagataccacgctggggagaggtacctaggcttgtccagtgtgaatgtctcggtgagagaggggcgggtgcaggcctaagtctggtaagcagtctggtggcttgtgtgtttggaagtctcccagcacccccatcctgtcccactaaggtagcgcatgtatctgttcttggaaggaacgtcctcgtggaatcgcttgttcctttgcatctgcttcctggagctggccaccttccaattgtggttattcttcttgcagccatggagaggctgccttcaggggaggttgtcacttactactggattctgtcatagggccagggggccccagagaagaacctggcctgcagagttcctttggctgtgagacagggctgtatatcagaatcacctgggctgctttacagtgtaaatctctgggtcccccagattccctccagaatcggggagtccatggtctttgataaacttctggaattctgcagtgcagccaggtctgagaaccgctgtcatcagcaccccaggtgtggttatggatgtggatttctggggtcagattgcctgtgctggtcctaggcccccacctgtcacttgcggaactccagcaggccacagaagctccccgggccctctttaaatggcacagtagcaattcccatctccgaggttgtcataaagacacaaaagtgaatacttcataaattgttaggagttgtctctggtcagagcagaagtggagaatgcagcctctaggtgtgctattttgggcaaactctgtaagcaaatgagaggaataaggttttccacctgtaaagaactatttttcctgacttcttagctacttctgagccatgatgaaacttttctttaaaaataaagattaggcagatagagatgtcctgtgttcctcctgggcggatgctccgtcagtatccagctgtctttctcccccactgcttaggttggggattacatgaactggggcagtgggggatttaaagctaaaatcaaggcttcggccttatcgtcaccgtcccacttgtcctgctgtagctttccttgtagcaggtgtctggctcttcaatgacagcccctcatgtaagaggtgatgttaaaggatctaattgtcagatggattgaattaaattgtcaaccccctccttttcttgttgaccagacattgatgactgttctcctaataactgttcccacgggggcacctgccaggacctggttaacggatttaagtgtgtgtgccccccacagtggactgggaaaacgtgccagttaggtaagaacatccctgtgactgtaatttttataccaaggttggctttgattgtcaaagccattacagaagacgagcgtgtggccggcagtgtgagttcacactccatcatgctaagaagtaatttattatcaagagtctagcaggcctgggagaaataacttgaatgcaaatggactagctcttttaggccctgtgggaaagtcgtgggattccttgaaccatgtcaatcgtctgtccgaggagtgttcagctgggttccaaaaggggatgatctcatgaggaatgagctgtctgcattctttttgccacatttaaatcccagcaactaggctgcctgggttttgcacagaaatgcctggtggctttctgctgttttgttgggggctggttaactagcagctggaaagttatcaattagggttcttattggataatagctagggagagggatcagatgcttaaaatagagggaacctctagtatcttttatttagctagcttattaaaatgtctcatgtctcagacaaactctggcctgttctttttttttccaaggtgggggagatgggggttgaacttcatttctcatgctcatccccatctcctttcagatgcaaatgaatgtgaggccaaaccttgtgtaaacgccaaatcctgtaagaatctcattgccagctactactgcgactgtcttcccggctggatgggtcagaattgtgacataagtgagtgactttgtttccattttgattttcatgaaacttgggtagccgacttgctggtccgtactggggctccagtcctaggacttgagcagtagaaggaaaaccttagagtgggaatggttttttgagagggagtggtcagggcagcagtgaaaacatacactttatcaggctcattagctgcgaaaaccagccatattctgataatgtggctgaaacaatgatgtgaagtttcactccctcattctggaagaattagggagggtccccacccagcgtaataaccttatctcacggaaagcacacaggaaatctgatttgaaacttatctatcctgagctgagaaggcttttcaattaagcccaatttcactgtaaattacctctttaaaatgatgacttatttattttttagatattaatgactgccttggccagtgtcagaatgacgcctcctgtcgggtatgtaaatctttgcttaaatcaaaactttgacaattgacaacaaatctttagatttgtgcgacactaggagagctctgtccctgtgagatttaaaaatttgggtgaaaaaagagtctcttggaagtttcgctagggcttatgttaccccagcctcgtgggagtcattttgaaggcatgcacatagaaattcctctaaccactttcagaggtttagcatttggctatttcagtgaaccagctaaaccgcaacagtcatgctaaaccgctgaagccctgtgtttgtggaatacatagaaaaaaagcatgtgtctctctctccccttctcctcttctaggatttggttaatggttatcgctgtatctgtccacctggctatgcaggcgatcactgtgagagagacatcgatgaatgtgccagcaacccctgtttgaatgggggtcactgtcagaatgaaatcaacagattccagtgtctgtgtcccactggtttctctggaaacctctgtcaggtgagtggtggcaaaacctcagatggccaagtttttagagcagagccgctgcctcctccgcttccctttacttttccctcagctcttgtgtctggaatttcctaacatctattaacatcctattgatgagagagtctctgctagacaaatgctggtggaaggagatactgacgaattattttcttcttagtgtcttcgtctttgtgttctttttggttccctccaccccctcttgtgctccctctcccactctgccccgttgtttcaaatactggacattggcagtccctacagcatagagatgtatcttacagggtgtctcctaatagaaaccgaaggaactgtcagattccagtgcctgctgccccagagaagttatcgtgacacctttgttttactctgatccctcccccttttcgctgttcctgatatttgcagctggacatcgattattgtgagcctaatccctgccagaacggtgcccagtgctacaaccgtgccagtgactatttctgcaagtgccccgaggactatgagggcaagaactgctcacacctgaaagaccactgccgcacgaccccctgtgaaggtacctcccttctcccgggacctggctgtctccagacttgctccttttgtccccacttactaccactgccccttgttacacttgagaagtaatgtattggtgaggaggacctctatagtgaaatgatcctgcctgtgtagcgggccgcaacacgtggaaacaatctattccggcctgccagtgggagagccgtgtctacaagtagcccaggggagagaatgtgaaatccatttagcattcctgttctggggtgggctgatgtgcaacgctgaggcaaatgcctgagaacaacactgtcaacagaacttcctgcaacggcagacagagggggatgttctgtatctgcacggtcaggtatgggagccccaggccatgtggactgtgactagtgtaactagaaactgattttatttcattttagttcatttaaatgtaaatagccacatgtggccggtggctgctgtattaggcagcacaacatttaaagcttctataagattgtccttgagccttgcttaagatcaaaaaggaagtaaataaagcaggtccttttgccttagcaagtgtttaccaaattgggtagatgtcaaaggtaggatgaaggggatccacaagcatgtgggttttcctggttgtgtggagggagaaaatgctttaaaactctttgcctggagtctcaactttgcctgtcataatgtgatgtggcacgttgccagtatcttggcttccctggggtgtgtctcattagccagagggtccctgtctccaggaaagtgggcttggcccaggcccttggcttaggaatgccgcatctgtgggtgcatggctgtgatctgatcccaagcctatcttctagtgattgacagctgcacagtggccatggcttccaacgacacacctgaaggggtgcggtatatttcctccaacgtctgtggtcctcacgggaagtgcaagagtcagtcgggaggcaaattcacctgtgactgtaacaaaggcttcacgggaacatactgccatgaaagtaagactccctcatccgggaatggaccagtgctccccagcctgcccctgcccctgcctctgcccctggcccaccctgggatcattggtgttgaaagttttttttttttttttgagaccgaatttcgctgttgttgcccaggctagagtgcagtggcacgatctcggctcaccacaacctcggcctcccaggttcaagcgattctcctgcctgcctcagccttcctgagtagctgggattacaggcatgcgcaccacgcccaccacgcccagctaattttgtatttttagtagagatggggtttccccatgttggtcaggctggtctcgaactcccagcctcagatgatccaccccccgacccccaacttggcctcccaaagtgctgggattacaggtgtgagccaccatgcccagcagtgttgaaattgttttaatcagaaacagtaaggctggggagactggttgagacttatccttacatctgggatctaagactgaggtcgtgttcaatttaccagatcactctgcctcggagcctccatatctatgttggaacattctggaatgttgctaggttgggtgattcctcttttctgtaggagtttcttccccactttcacctagtaccggtgactaaatgcccatgtgagggcattaagtgggtaaggcactctctggaagcttctgcttgataagccgcctgtctaatttgagaaacagccctgatggagggtagcaggtggaggtgccaggtgcattgtgtcaggagggagccatgaaaactgctgaacagtgcttgtctatggcttcacaagtccttcagttctttttttgctttactttgtttcatagatattaatgactgtgagagcaacccttgtagaaacggtggcacttgcatcgatggtgtcaactcctacaagtgcatctgtagtgacggctgggagggggcctactgtgaaaccagtgagtctgccactctttggggagctctgggatgtatgggtcatgttggagggatcccacttcaacgtgggaaaactttctttgtactggaaatctctggaagcaagaccgcagtgatttctgcactgggacagtatcacttgtgtctcatttgcatttatgagtcctgatgatagcttatggggaggagcttctgctgaggacctatagaattagactgtgtaataaatattcctgcttgcaaggaaagtcatatttctactttcatttccatgggacttccagaggcccaccccacatcttgcctaacttgtggcattcaaagtaacccagttgggagctcctttattcctggaaaagcctgattgtgttaaagtactacgactgtggctgttctcagaataggatgttggatgtaagcagtaggaaaggcttggctctcgcctgtcgtgaatggtcctggatctcgtcttcagccgattgtctcccctttgattctagatattaatgactgcagccagaacccctgccacaatgggggcacgtgtcgcgacctggtcaatgacttctactgtgactgtaaaaatgggtggaaaggaaagacctgccactcacgtaagtggtagttggccttggatgctatctctgggacccttccctctgtcttctgtgggagggggccactgggactcacactgaaatattttcctccaggtgacagtcagtgtgatgaggccacgtgcaacaacggtggcacctgctatgatgagggggatgcttttaagtgcatgtgtcctggcggctgggaaggaacaacctgtaacataggtaactttatgccccacgtgggatctgcagtgggcatggccacctgggcgtgtctgctggttggcccctggagcttatgatatttctctgggcctggttcttgcccctccagactgtttctggatactcagggagggtggtcgtgtctgctcttcttttatagcccgaaacagtagctgcctgcccaacccctgccataatgggggcacatgtgtggtcaacggcgagtcctttacgtgcgtctgcaaggaaggctgggaggggcccatctgtgctcagagtgagtgtcctccccccttgaactctcccagggctgtcggagcagatcctgacacccttggggacttgcaatggaaaccagaagcagagctgtttgatgtctgcttttgtatcacctgggtctgcattaatgacttgatgggatacagccctgacctgggcatgagaaagtcgccaataagataagtggagacagatggcgtctcagttcccagctctgggtctgaccagcagcctgtctccttccattctcacccccacccctatcccctaccagggcctcttcctgtgtacatgtgtcccacagcaaatgaaactaagtgtggtgcgggcctggttccaatttagcaaaggtattttgctggtgttaactacgactttatcatttgggtattaggaaaataagtggtggttttacttagggctaagaccgctttccctgttgaagtcctcactattaagttgtcttttctttgcagataccaatgactgcagccctcatccctggtaagtgtgacatccttttaagccagcactcatccactatcgtgtgtgtgtgtgtgtgtgtgtgtgtgtgtgtgtgtgtgagaatcacccagggattgtgtttaaaatgcaagttctgagtcaggaggtctggggtggggcctcagactgcttttctaacaagctcccaggtgaagcgatcctgctgccccatggaccacactttaattagccaggttgtgtcctcatttagagcagtgatttttcaaccttggctgcacaccagaatcacctgggagcttttaaaaatcccgctgcctgggctgcaaccaagacctgtgaaattagactttctgggggtgggacccaggcatcagtattcttttaaaattccccaggcaacggccatggggtgagagccactgactgtaactggtgtggtgacatgtgagtgattggcagccagagtaatggactgggaggttggtaaccaaggtggtctttgctttcttagttacaacagcggcacctgtgtggatggagacaactggtaccggtgcgaatgtgccccgggttttgctgggcccgactgcagaataagtaaggactgtctccgtctggttttcccaatggctttaccgcttcattccatgcctcaccccaagactttcatctttaaaaacaaagccaccattccctttaagtagctctcatagagcaaaggatctctctcctccagctgggattaagatatgccaggctggatcctcccaggtacctgctggtagttccctgggtggtgtagccctccttgttcttggggagagagtgccagtcacagaatctgatgattaatctacagtggggtcctgaagaaagtatgtgcatttccccatgactaacatgaaattatgggcaagcagatgttaaccacagctacactggtataggataaagctaatacaaacggaagggaggacgactgtggcttccagaggcttgtctgtgctgggtctgatcaggccctggagaaatgactaaaacaggaaaataggggcaggcaacgcagtttttcaagaggcttaaagcatattattttgagccttttctctacttttttacaagccctttctcttacagaacaaaaaaggtgctagagtagttatggtttgattcttgtacccaaattgtctgaaattttactggtgcttgaaatccaagtctgggattaactagtcttcagcactagatgggggcaggttgtatctgtttcatgtttctaaataaacagttggcaaactgtggcccaggggccgtatccagcccactgtctgtttttataaatacagttttcttggcacacagccacacattcatttatgtattgtctatggctactttcatgataccacaagagttggatagttgtgacagagactatataccccacaaagcctaagatgtttactgtctgaccccttccaggaaactttgccaggcttgctgtaaattgcactgtcaaaggaatcaaattaaaaattgctgcctcccaaaatggttctccactgttagaactcaggatggtggtggtctttgggagccagtgattggaggtttttgcaatagatctgtttcttcttttggatgctgcttacctgagtgaaaattcatcaagcttatgatgatatgcttttcttgtatgttatgtcaataaaaacaatctcaaaacattgccacacaccatcagtccctaaacttgaactccatttctcctagacatcaatgaatgccagtcttcaccttgtgcctttggagcgacctgtgtggatgagatcaatggctaccggtgtgtctgccctccagggcacagtggtgccaagtgccaggaaggtatgtgtgccaggcttcagctgcccatgggtcttctggggtgagcgagctttgcagtcaccatttgacttttcacaaataagccactgtgctcagggaagggaacacacagtgggactacaagggaaagggaacgtgaagagtcttccccaaaacaggtagctgttgtttttggtcagctgttgccacaaaactgtgtaccaaaccatcccaaactgctgtggcttgcagcaagcattatttttattgctcatgatatgcagcatgggcagagagattgcgctgtgggttgggttcagttcgaccagtggctgtgtctggggcatattcctttcatcgccagtgggtaggtgtgcaagaggctagtcaaaggctctgctcacatcacatctgccaatgttacattggccagagcaagtcttgtggccaagcgcagagccagcaaaggcaggaagtacacatgctgttactgtgggaagaatgatcttaacatggcaaagggcacaggcataaccatttcataacagggaccaaagaattgaaccccgatccggttcacagaaaaataaactgctcacccgtctccacctgtcagtttcagggagaccttgcatcaccatggggagtgtgataccagatggggccaaatgggatgatgactgtaatacctgccagtgcctgaatggacggatcgcctgctcaaaggtaggacatgatggctgccgcagttcacctgtgttctggaatcagggatgagcatgcctgctaagctgccagcttctgtttttctccaggtctggtgtggccctcgaccttgcctgctccacaaagggcacagcgagtgccccagcgggcagagctgcatccccatcctggacgaccagtgcttcgtccacccctgcactggtgtgggcgagtgtcggtcttccagtctccagccggtgaagacaaagtgcacctctgactcctattaccaggataactgtgcgaacatcacatttacctttaacaaggagatgatgtcaccagtatgtaacaacctttgttttttttttgaatggtggatgtctgcttgcttgctttaaaggaggaatgccatgagctaggatctacttctccctagcttacattcctgttttataataaagtaagcttgaacttagccagcctcaaagagaacatctcagccttttgttcttcctctcaatcttacacgtgtgtgggtttttaaaaatcgttttagggtcttactacggagcacatttgcagtgaattgaggaatttgaatattttgaagaatgtttccgctgaatattcaatctacatcgcttgcgagccttccccttcagcgaacaatgaaatacatgtggccattgtaagtataagacccattcacacctcattattcgatggcaaggcagttcggttaaccagtgtctgaatggagcaaattcactgacaaaaagctttgcagacacagattgtcgagtaattttgaagaaaggctgctttgagtattcctctgactctcaagtctgacaattgtttttccagtctgctgaagatatacgggatgatgggaacccgatcaaggaaatcactgacaaaataatcgatcttgttagtaaacgtgatggaaacagctcgctgattgctgccgttgcagaagtaagagttcagaggcggcctctgaagaacagaacaggtaggtgtcaagtgggactagtttgtgtgatgatagtagatgatctcattatactattcaataaagccatcaggtcgagggattatctggcagtgccctaccctcgcaggagctcccaatttaactgagaactgagggcagcctactttactaaggtcacatggcccatgggaacagaggtctgcctcatattttccttcccaacacactatgcaacgttccctgcagaacaggtattgtgctagatccgtgacaaagccctaggacactgcttgtcctttgtccttgagtttgaagctgtacaaagcctgacttggcattttggtgtcctgggacagcctagccactgctgagctctgtgaggctcgatggccccgcaggggtgtccaggcttccctcctgaggatctcgagcaccgtttcagccaagggagagattgggcatggagccatggcacgtttgagctgtctgtgctaatttgaatcggatttctagttctgaaaaccaactcctgtactgagctgcctcagtagccagacttaacaagacactgctctccccatgcgaagtcaaagagcctgtaggagctgccgctccacccagtctctccagggataagagtatcaaggtctacaggggcctgatcccagcatttgcttatcaagttgtgaagtgaccatatgcaatgatgaaaagggacttgtccctgtggcccccctcttagggataaagggcaggagaaccactgttggtattcttttgttcctgcgatgatgcttttttctttctttcttggagagttaattggttttgtgcctgccttacagatttccttgttcccttgctgagctctgtcttaactgtggcttggatctgttgcttggtgacggccttctactggtgcctgcggaagcggcggaagccgggcagccacacacactcagcctctgaggacaacaccaccaacaacgtgcgggagcagctgaaccagatcaaaaaccccattgagaaacatggggccaacacggtccccatcaaggattatgagaacaagaactccaaaatgtctaaaataaggacacacaattctgaagtagaagaggacgacatggacaaacaccagcagaaagcccggtttgccaagcagccggcgtacacgctggtagacagagaagagaagccccccaacggcacgccgacaaaacacccaaactggacaaacaaacaggacaacagagacttggaaagtgcccagagcttaaaccgaatggagtacatcgtatagcagaccgcgggcactgccgccgctaggtagagtctgagggcttgtagttctttaaactgtcgtgtcatactcgagtctgaggccgttgctgacttagaatccctgtgttaatttaagttttgacaagctggcttacactggcaatggtagtttctgtggttggctgggaaatcgagtgccgcatctcacagctatgcaaaaagctagtcaacagtaccctggttgtgtgtccccttgcagccgacacggtctcggatcaggctcccaggagcctgcccagccccctggtctttgagctcccacttctgccagatgtcctaatggtgatgcagtcttagatcatagttttatttatatttattgactcttgagttgtttttgtatattggttttatgatgacgtacaagtagttctgtatttgaaagtgcctttgcagctcagaaccacagcaacgatcacaaatgactttattatttattttttttaattgtatttttgttgttgggggaggggagactttgatgtcagcagttgctggtaaaatgaagaatttaaagaaaaaaatgtcaaaagtagaactttgtatagttatgtaaataattcttttttattaatcactgtgtatatttgatttattaacttaataatcaagagccttaaaacatcattcctttttatttatatgtatgtgtttagaattgaaggtttttgatagcattgtaagcgtatggctttatttttttgaactcttctcattacttgttgcctataagccaaaattaaggtgtttgaaaatagtttattttaaaacaataggatgggcttctgtgcccagaatactgatggaatttttttgtacgacgtcagatgtttaaaacaccttctatagcatcacttaaaacacgttttaaggactgactgaggcagtttgaggattagtttagaacaggtttttttgtttgtttgttttttgtttttctgctttagacttgaaaagagacaggcaggtgatctgctgcagagcagtaagggaacaagttgagctatgacttaacatagccaaaatgtgagtggttgaatatgattaaaaatatcaaattaattgtgtgaacttggaagcacaccaatcttactttgtaaattctgatttcttttcaccattcgtacataatactgaaccacttgtagatttgatttttttttttaatctactgcatttagggagtattctaataagctagttgaatacttgaaccataaaatgtccagtaagatcactgtttagatttgccatagagtacactgcctgccttaagtgaggaaatcaaagtgctattacgaagttcaagatcaaaaaggcttataaaacagagtaatcttgttggttcaccattgagaccgtgaagatactttgtattgtcctattagtgttatatgaacatacaaatgcatctttgatgtgttgttcttggcaataaattttgaaaagtaatatttattaaatttttttgtatgaaaacatggaacagtgtggcctcttctgagcttacgtagttctaccggctttgccatgtgcttctgccaccctgctgagtctgttctggtaatcggggtataataggctctgcctgacagagggatggaggaagaactgaaaggcttttcaaccacaaaactcatctggagttctcaaagacctggggctgctgtgaagctggaactgcgggagccccatctaggggagccttgattcccttgttattcaacagcaagtgtgaatactgcttgaataaacaccactggattaatggcctgtagtgtcgaggtgaattgtttgtgagcaatcaggggaactggccacagcactgaaagggttttaaagggtttggaattggtgttgggaaacgagcagggagatttaatgtctgcctcttttttttccctggctacttagattcatattaatgtcctgttgtaagggtgtggtctgaaatgactcttgtgcacatttacccatggggtggtttcctcacggcacaggaggtggtagttgcaagcttctggtgttcgggctcatcactcatcaccttgttcccagggaatgagtgttctggcctcaccatgcagccttggagtgctggtgttctggtcttctgtgaggttccagagttgggctgtccccacctgtcacgggcaggagaactctggttctctcacttgtggctggtggaggccctgcccccgcatcgcgtggtggggtgtgggagaagctttgcctctggcacctctgcggaaggaataagctgtggtaacaagcacatggacagcttccagcagccgtgcagagtcaccaggactctgcttctggctaggaaagccaaagctcacccttctcagagccatcccccagcac

SEQ ID NO: 19 - DNA, 30927 bp, Homo sapiens
gctcaagcgatcctcccacctcagctgtcccagtagctagaactacaggggcgccaccacgcctggcgaattttttgtagagatgggttctctccaggtggcccaggctggttctgaactcccgggctcaagggatcttcctgcttcagcttcccaaagtgcggggattaccggcgtgagccaccgcgtcccgcctgtttttaatttttagcagttttaaatcttctggcaatgagtaatgttatagtgtcccagatgtttggtcctttaagaaaaggatagcaggacgggttatctcggtgggagcgtgttccacctctgccctccgccagccgccctcgccggggatgcacccaggtattttcctccggatgcgtgagtggctcgcccgcggacacgccagccccgccccgcgagcccggtttccccgccccctccccgcccacgccctgcgctcccttcctattggtcccatgccgcgctttcccgttcaatcgcagcgcttagcgccagaatttgaatcttcgttttcgtttgaattgggcgggcgcgccgggctggaagaaggaagtggagggctgacgctgcgggcgggcgggcgggcgggaggactcgactcggtgggagccgctagagccgggcgcccggggacgtagcctgtagggccaccgggtccccgtcagaggcggcggcgggagcagcggggactgcaggccggggtgcagcgaacgcgaccccgcgggctgcggcccggtgtgtgcggagcgtggcgggcgcagcttaccgggcggaggtgagcgcggcgccggctcctcctgcggcggactttgggtgcgacttgacgagcggtggttcgacaagtggccttgcgggccggatcgtcccaggtgagctgcggccgggactcctgggagctgtccggggtcgagggctgagccgcggggaccccccgagctctgcggggacgggcaggggacagacgcgcggcctgggcccgactcctcctgggctctggcgagggcgtctcggtggaagctcccaggaggcgcaggcgctggcgacaacaccccagctgccggactttggggcgccgggggctgcggtcggatcgtcctggggtccccgctagctagctgcggtgtgcgcttctgtggccggggataggtgaattgggcacggggcccttcttagctcctttgctatcagagtaactcgcacctcttttgcagtggaagagttgtaaatttgcttctggccttcccctacggattatacctggccttcccctacggattatactcaacttactgtttagaaaatgtggcccacgagacgcctggttactatcaaaaggagcggggtcgacggtccccactttcccctgagcctcagcacctgcttgtttggaaggtgagccccgcgggcgcgcgcggacgttttagctgagaaagaggaaaataccttagtcacagaataaagtccagaaacgcgctctaggattgggtcctgccgtcacttttccttggtgcttctcccattcgttactaagttgacatagttgtgtttttttgttttgtaagtataaatttgatgctagtttgtatgtttaagtggttttaaaaatcaagccaattaaaaaaatcgatttgctaatgttgcggtaaagaaagatgtagatgatcttcatatgtcactggctgcaggcaggcgtctgaagacactgtgcgcccccgggtgcctccacagtgggcatccctggccactggggacacagagaatgaaggaaggaagccatacacttgtctcttggctccttgtggcaataggaaaatgggacagaaagtcttcctgcctggaattcgagaacgtttcctcttatattgctgtcctgtttggtggtggtaataaccctgtccctgtataacaggtatagttgctgacagtgccccatcagcctctgacatgtgtcccactagaggcctgagaaggggggtcatttcccgtgtggtcatttcccagaccacacgggattcaggcctcaccctgtcctcccaaccccatcccggcctcaccctgtcctcccaaccccatcccctaccttgttcctcccgcctaaggcattccaagcctttgttcaccttggtacttcttacacacttggaagtttacaatgggaaagttctccccttcctcaagcttgtgtgatttccatcattcaggcatcaggtgaaatgtcacctctgaggaagccttgcatgaaaacttgtatttccaaccccacagcttcaggggtgagttgtgggtttgtctcccactaggctgagctccccaaaggcaaagactgtcttgttactaatcacgtgtgtagggccagggatggtgtctggcatagggggtgtgatcaatacctagcattctggcaagggtcagtagaaacatgggctggagccatggatttgcaatctcttgagaacagtggttctcacaggagggtcatctaaccttccaggattcatttgaatttccatgtcacaatataggacaggggcatgcgctgtcatcgcggaggagaggtcagggtgggcatcctaccaggctcagggcagcccccacaatacagaagcatctggcccaagatgtcaacagtgccaaagctcagaaacacccatctatagtcgtcctcctgccaaacaaattctcagttgtaagggatagtctttcctttgctctgatgtcctgttaccttaaaatcaaattattttattggggttaaggaagcttttcactttccatagatacctttctcttgaaaaggaaaaatataaacatttcatctccagtggcagtccttttgcttttttatacagtactccttgaatatatcttcatgcaagattttataatttagaaataattcctaagtgtttggtcacatgacctgggtaggaagagagattcttagactccaaaggttcagatggagaacagacaggccattgcatagtttattcaaatttttaagatcacaggctagaacaggaacactgaagactccaagaacctactaacaaactcttctgattattagtttgtataggtttaggaattgtctcttctgctactttgccatggtgttagctttctgtggaaaaacaagttgaatttagattttttttttgtgtcgcttgcaaattagtatttttattgtttagagacttgaatctgtcagtaaattcagtgtagttttaaaacaacaatgaaaagcttacccataatgagcatttactatgtgctaggcaaattagtgacatgtacaaccatttaattgaacatcacatgatgtaggttctaatgtaatttctttattgtatatgaagaaactgatgcacagaagtgctagcatcaaataagcacatttggggatgattaaacctctaaacatatttaacattacaaacaaacgtttttgaaaaagcacagagtattaaaaatagtcattatccaaaattgatgtaagtattcctttgtgtcttttaagtatagcttttcatataaaaggtaattcgatttgtgttctagtgttttcccttgtttttacatactctctgttttaaagatctaatagttacatgtttaatacttccaaaagttctttgcaaaatgcaagatcgtttacattgcccattttgtttgttactcctttatgtcatatttacagatcaaacattctagtcaaattgtgttttattttgggaaattgaggtaatcttttaaaaagttgcagcaaccaaaaaaaccttcttcttttgcatgaaggggtattgaatgtgacatccgtatccagcttcctgttgtgtcaaaacaacattgcaaaattgaaatccatgagcaggaggtgagtgggttttttgaagatctacttttaaagctttttagttcacttttaatctgttcattagttacatatttccccttcttttcacttgcaggcaatattacataatttcagttccacaaatccaacacaagtaaatgggtctgttattgatgagcctgtacggctaaaacatggagatgtaataactattattgatcgttccttcaggtaggtaaaagctgattggtctaacagtaaatgtcatcttctgattaaccataaactagtgtcaaagtcaactgtcattcttctttaatgttcatggatgtcaaagtatttcaggttttcattctcaacactaatcttaatttaaaaggatatggatctaggaagatgactaattgggacaaaatgtgatggaattcaaggatttgggtgcaaataattatgcagagggaggttgaccttgtcctaaaggagtttgttattttcttccaagtgttttgaaactgcatgagatttttctattcttttttattttaaagcaaaatatacacagagaaaaaggtacaaaacaagatggacaggtcaatttatcatgtgaacacccttttgatcaccacctattatggactgatttgtgctctcccgaaattcatattttgaattcctaacccctcgtaccttaggatgtaactgtatttggaaagagggcatttaaaaaggcaatgaaggctttttgagctattagtatgggccctaatctgatgattggtgtcattataagtggagattagggaacacgtgcacagaggaaagcccatgagaagaggcagcaagaaggcagccatcttcaagtcaaggagagaggcacagagaaatccaatccagctgacaccttgctcttggacttccagcctccagcactgagaagggcatgtctgtttttcaaggcattcagtctgtgggactttattatggtggccctagcagactaatacatcctcagctcatatagaacatttccagaagctttttaaaaatgctgttgtctaatcactacttcattccctcagcaagtaaaccaccgttttggcttttaggatatcataaacgtctcgagtttcactacctaagcatggatctctgaacacgatagttttgtctgttcttataaaagtccttaacagtgatacaagaatgtatacatttgtgcctggcttgtgcttttctgtgtgtgagattcatagcatgttggacatctctgtagtttgttccttctcatggcataagtatttcactgaaaaaaaaatgtttaatatatacaataatatacataactatacagaattcattcattcttgatggacatttgactaatgtctagtctttgaaatgtgtcaaggtttgctttatgagcagatatggctaattatcttactaatctgccttgtgtaattgaaaactgtattctacagtgtctcatatatatgtaatatataattattatatatatcacttatataatatataattataatatattatatataatcatatataattataatataatatataatattatatagtatatactatatgttatatagtaatatataatataataatatatattatatataccatatagtatatactgtatacagtatatactatatggtatatataatacatatacaatatatatacaatatatttatattatataatatataatatatacatatataatatgtaatatatatacacatatacagatacacacactcccgttagattcaaatctataatcttagtaaattttcccctactattattctaagagatatgttcaaatcacctactgaggattgattgattgatttgtttttatctctatcagtttttgctttgtatattttgaggctgtactatggtgtacaaacttagaatgatgtcttggtgcatggaactctgtcatttagagatgtcctctgtttttagtagtgctttcttttctgcttaatgtttcctttggatgatgagtatggttaaactaatttccttttgatgagtgcttgtgtagtataacttttccacccccttaattttaacttttcataattgttatggtttaagttgtctcttggaacctgttgtcaggtgacctcttgtgtttaactggaatatcttcttgctggattgatccttatataaaatgtcctttttctctatgaataacttttgtctgagatgattttgtctcatgttagtacagtactccagttcccctctgcttgctgtttgcatggtatatcttttcccatgcttttattttaaaagattgtgtctttgaatcaaaattgcgtctcttgtagacaacgtattagttgggtcatttaaaaatccattctgctaaatgaatctctgttattgtcttcatttgtattagctgttttttaatgcaccacttaaattccctagtcatttcttttactgtgcttctgggaagtttgccttcatttttaaagagtatttttattgaatacagacttctatgtaggaagtttttctttttttctttttctttttgtttgtttgtttgtttgtttttgagacagagtcttgctctgtcacccaggctggagtgcagtggtgtgatcttggctcactgcaacctccgcctcccgggttcaagtgattctcatgcctcagcctaccaagtagctgggattacaggcacgcgccacaacacccggctaatttttgcaatttttagtagagacggcgtttcaccatgatggccaggctggtcttgaactcttggtctcaagtgatccacctgcttcagcctcccaaaatgctgagattacaggcatgagccactgcgcccggcctataggtaggaagcttttgatgtttattggagggctgaactatttttcaaaacaagatattatccaaattgagataaattcagatgattaaagacatccaacaaagatttgaaagtgaatcttagaaagagagacttgattccaaactctctaccatgagaaataatatcagatgtgtgactgcttcagatcttacttaggttgcctataaattcaaatcaggtcatttcactgaggccaaaagttttcattatgcaaaataaaggattgcttctatgacttgatcactgaggtttgccaggacaattatgtatcttgctaaaggtgatcttcttaagatgtacctgtcttgttcagatacagactgaatgtgtgggaaactgaagtgatcatagtgttctaaaatataggtttgtagttaccctgtagtgtaagtgtagctttttatttaccctgaagtatgtaacttcacaacgtgagaaagattcagttacctacaggcttcctggctggccttccaagccatccgatgatttccatggacttaaactagaagaaacttgactttgctctcatgtgcattagcttatgtcatagaaggtgcttggtaatattgtcaaatcatacctgggctgttcgtcagtgatcagaagttaatctgggtccccagcctctgacagtggtatttcaaaacaaactcgatgcaactaatcctagtttttagtgtaaaagcacttttctaactctaaatttatttctttgtataaggtgatgtcttgaactaaacccaaagtttgttcgttgatccttggacattaagtggatatggagacttccgccccagggtataaatttttaatcaggatctttgtcgttctataaactgcaggtatgaaaatgaaagtcttcagaatggaaggaagtcaactgaatttccaagaaaaatacgtgaacaggtgatagaaaatatccaagtttgggctgattcgtttcgatgatatgaaatcatttatgtatgctttaatgatttcttacttgaaatcagttacaaagagggtggttactgttatagtaggaaaatgtaactaaagtataaaaacgagttgaacttagacgtattaaaataatctaaaatgatatttcctctttattgttcaaaatcagagcactaagttggtcttacacttttagccaaaaagtctattagagcatgttgcgagctttttgcaaacccatgattaggataaccccaacacgtagagctaacatttgggaattgcattatctggtggctcattttgtcgcccagtcattgtactcatccgtctttatgtgtctgaaataatcacattatgaaaatcatgagtgccaaagatgcttctctattttgatagatagacgacccatgaaacaggaaaagggatcctgtgctttgtcttgtgagagaatcctatagtttgagtgtatcagtgtggaacaggtattccaattgtacagcttatgaaaacataattgtcgacacgtgcttcgcaatttagatagtttgagtatatcagtgtggaagaggtattttagttgtacagcttattaaaacacagttgtcggcatgtgcttggaaatttagtgggatttaggcttaggatgagccctgagaattcatatttttcctacattttagagtgctcctaaagctagtttcagatgagctccttggaatatcttggcttaggagagttatcttaggtgcacctgaaattagcagtaggtactcttgaatttcaacatttctgcctttttttttttttttttttctgagacggagtctcactccgtcacccaggctggagtgcagtggtgcgatcttggctcactgcaacctccgcctcctgggttcaagcaattctcctgcctcagcctcccgagtagctgggactacaggtgcacaccaccatgcctggctaatttttgtatttttagtagagacagggtttcaccatattgaccaggctggtcttgaactcctaacctcgtgatccacccacctgggcctcccaaagtgctgggattacaggcttgagccaccatgcccagtccatttctgccatttaagtactgccttcttccctagaggagcagccttaatgttgaatctgatggtcatcagttcccgtgctggaagccagtttctgaggcatcccacactgtagccaccaggcaacttgctagtctatgggagtaaataaaccaaaaagccagttgaactgtgggttagatatgtgccactcagcagtctaggaactgtttgttctgttactggtctgtgatatagtgagtactgaaatggagtatgtagtaaatatgacagcaattcgacagcaattttgtggctattgaatgtaatcgtacaacaaaagtgagattatatactttacatattcataattttattagtggttcatttatattgtttagtcataagattcttgttccacttcagattggaaataaaaaaccatccctcacatagatagttttagaagcaaggtgttacgtatcaagaaacctaaaattgattaaggaagttagattctttgcctttgttaatattttttagatattttcttaataatccagatgataagcttttcttcctttggggcatcagacttttataaaagttatatatatatgttattctttagttcttccacccttccggaaataattccatatgaaggaaagttagggcgctgtctctggggagccaggtgggggcgctgcgcctgctcccaggctgtgaggttgcagaatctgtgaatataccatgtgtgcctgtaccatgaatttacctagggtgaatctaggctctcagatccaccctaagtatccaccagccaagagggcgcacatgccaagtggagcctcagttcatcgacaggtcctatggcccatttatgagaaaactgatgacgcagtcagtagttctgagctcgtggggggttacagatcttcagtataggtgatgtttaatattgactttggttcttccgcaataggatgttgggaaatatctttaaaggaagttataaaaacacaccgaggtttgattttagtaattttaagcctcgaatttgtttcctattaatcactcactattttttaatgagtcagctaataagtacttttatcctgaccactagctcccaactgacttgagctcatttctcaaacagtctttaaaagtcatatacgagtggtttggtaaagaaaacaattttttattgtttttatttttattttttgagacagagtctcgctttattgcccaggctagagtgcagtggtgcaatctctgctcactgcaacctctgcctcccgggttccagcaattctcctgcctcggccacctgagtagctgggactacaggcacctgccaccacatccagctaatgtttgtatttgcagtagagatgaggttacatcatgttggccaggctgttctcaaactcctgacctcaagtgatccgcccaccttggcctcccaaagtgctgggattacaggcatgagccatcatgcccagccagaaaacaataaataatattttcactgttgtgactgtcatcatttagaaagacctgcaaataactgttcttattttcccaacttacaggagccagcacgtcgtgtctcaagatctagcttctcttctgaccctggtgagtagtggttgggttttgttccagaatcctgaaagatcaggtctttgcgaagcatattggcaaagaaggggcaacaagaatgcaagtgctaaatgtctagcctgtcagaaatggaggaggtgtcatttaacatgtcaacgacagacagatgcctaactttcccttggtgactgatggtatgctatgcttaggagagactctagatatgagaaaattgcctgttcagctgtcaactcagttctcagtagttagatagcatgtgctatttcatactggttattggagctgatatgatttatatatttgtatcataatactagtatcataagacttgcaagttttaggcattaaataatttgtaggccaagtaaaagctagcttataagacaacctgaaacaattaaaatattgaattccacaaatgttaatcattgagaaaatgctgaacttctgtttcttatttcataattcattgccaagatgagaaagctcaagattccaaggcctattcaaaaatcactgaaggaaaagtttcaggaaatcctcaggtacatatcaagaatgtcaaagaagacagtaccgcagatgactcaaaagacagtgttgctcagggaacaactaatgttcattcctcagaacatgctggacgtaatggcagaaatgcagctgatcccatttctggggattttaaagaaatttccagcgttaaattagtgagccgttatggagaattgaagtctgttcccactacacaatgtcttgacaatagcaaaaaaaatgaatctcccttttggaagctttatgagtcagtgaagaaagagttggatgtaaaatcacaaaaagaaaatgtcctacagtattgtagaaaatctggattacaaactgattacgcaacagagaaagaaagtgctgatggtttacagggggagacccaactgttggtctcgcgtaagtcaagaccaaaatctggtgggagcggccacgctgtggcagagcctgcttcacctgaacaagagcttgaccagaacaaggggaagggaagagacgtggagtctgttcagactcccagcaaggctgtgggcgccagctttcctctctatgagccggctaaaatgaagacccctgtacaatattcacagcaacaaaattctccacaaaaacataagaacaaagacctgtatactactggtagaagagaatctgtgaatctgggtaaaagtgaaggcttcaaggctggtgataaaactcttactcccaggaagctttcaactagaaatcgaacaccagctaaagttgaagatgcagctgactctgccactaagccagaaaatctctcttccaaaaccagaggaagtattcctacagatgtggaagttctgcctacggaaactgaaattcacaatgagccatttttaactctgtggctcactcaagttgagaggaagatccaaaaggattccctcagcaagcctgagaaattgggcactacagctggacagatgtgctctgggttacctggtcttagttcagttgatatcaacaactttggtgattccattagtaagtttatttaattgtaaatttatttttctaaaagatgaacaccttctatgtagctgtgagaccttcattctttcagtagtgattagctttgtggaagagaatgtaagcacataaggcacagggataagacagacacgcacgctgttttcgctaatagatgaatactgaaggcctaggtaattgtaacaaggaatgacagaagagatggaagttgtcaggcaatcatgaagcaggggttattgaaggagatagggtggccccaaaaatatttgattctcctccatctatcacaaaatagaaaagagaataatcataattgcttttcacatggagtttaattctgaactacaatcaactgtatcatatgagtttggtcatgtggaataaatcactggtaatcattaaacatagcggtagttctcaggtgttgatactctgttttcagagtgtcctacaaacaatttgctgtaaacactggactgtacccatgagtccatatgccacatgaacacttgatccttggtgcaatagcagtgcccgtggctaggttgtctttttagagctatgtcacacatgaggaaacgcacaacccaaggccagtcaggaagtggcagaggtaggacctttatagcaggtgtggtagctcctcgggagcttcctacactcctagggactggctattagaagaaaagttgtctgggccacagacgcagtattcgtactccaggctgtgtttctgcaggtggcctatagcggtggggcatgaggctgtcgataaaataaggtttgtaacatcagtctcagtattccaccaagcttcctagtggggaagcatcacttaggcaagggatttacattaactggtggctcaggaaaatgtgtggccgggactgggctcctgtgaattgactcagaaccacctggaggagtttttacagctcatgcattctggtcactgggtggctcaggctgagacccaagtgcatgtctttagagagttctctggctgtcgtccccctactctaaggtgaaatctgctgctgcagactcctcctttctatgtccacacataatgtttcaatgttttaaagaaagcctctgtactgtccagtggcaacttgacgtcttagtggccactcccgcaatcctttaggaactcttagtagcttagcttcaccaggattgcaagaatagaggcgtgctgtaggtactgtgtttcgatgacttttcacttggtttgtctttaatgctaacgtgaaataaatcactagtcttggtatgttttttcattgctctttccacatttgtatccgttactttagatgagagtgagggaatacctttgaaaagaaggcgtgtgtcctttggtgggcacctaagacctgaactatttgatgaaaacttgcctcctaatacgcctctcaaaaggggagaagccccaaccaaaagaaagtctctggtaatgcacactccacctgtcctgaagaaaatcatcaaggtgagttgaacaagcagcatcccattcacgcccagtggctcacacaccgggtacctattcctttccaaatactgacacaagtagaattatgatgaagacctttatttatttattaaagaaacaagtttttaaaaagacgaatgaaagctcattgatgtgggcaccagcaaaggagcccctgggtccctgaccgtggtgctgatgcgaccgagtcgggggagtccttgatgttgtccttttcgtgcagaagttcccagacacccacgcttacagcactgcgtaatcacctgcaggcaccgtcagaatagccaattacaaagattctggatacattaccacgtcgacccataaggattgttttattttcttttagagttacaaggctatagttaaggcatttacctggtgtgaaggaaaatcaatggcacatcttccttttacaccttcagctctttagaatatttgcttgcctgttcctttgctgtgttgtccttcctgggtttcacacctctgggaagtcatggccctatagctcataacctttgtaatagggcctgggcggtctttctttccttctcttcccagcaggagtggaaagtgatgtctggctccctttccattttacactggctcccaggggcaagcagtcctccctccatgtggactgccgggggctgggtgctcacagctggtatttactgggactgagatcagaccctgcttgtctttcactgatcaggatgttccttccacctttttacctgaaatgacctcacttcagacttggcttgcttctctttccttttccttaaatgactgagacagtctcacctctaccatagtcttcaaagacagtggcttaagcatttgatgcttcaagatttaaacagctgaaattcttaactgaataggtttttatcagtcattccagagatgttagatccttgttaaggcttcttgtaaacaattttgtcttgtcaggaacagcctcaaccatcaggaaaacaagagtcaggttcagaaatccatgtggaagtgaaggcacaaagcttggttataagccctccagctcctagtcctaggaaaactccagttgccagtgatcaacgccgtaggtcctgcaaaacagcccctgcttccagcagcaaatctcagacagaggttcctaagagaggagggagaaagagtggcaacctgccttcaaagagagtgtctatcagccgaagtcaacatgatattttacagatgatatgttccaaaagaagaagtggtgcttcggaagcaaatctgattggttagtctgacattagaatacatatattaaggtgaattttttcatgaatgctaatttttgaaaagtttcgtcttttccctttgacagttgcaaaatcatgggcagatgtagtaaaacttggtgcaaaacaaacacaaactaaagtcataaaacatggtcctcaaaggtcaatgaacaaaaggcaaagaagacctgctactccaaaggtaggggcctcactgaatggctgctttacacataccggtgtcatcgaagcttgcattcagtgtggatttatgctttaatgtcctgtttacctccttcctgttttctacagaagcctgtgggcgaagttcacagtcaatttagtacaggccacgcaaactctccttgtaccataataatagggaaagctcatactgaaaaagtacatgtgcctgctcgaccctacagagtgctcaacaacttcatttccaaccaaaaaatggactttaaggaagatctttcaggtaaaaacgtagtcttagatcttataaatcttttgactctactgttttttactgtgttaatgtttgttttgctaactttgtttatctgctgtgaaagagattataaaataaacgactcaatcacccttctggggtcttagtgttcagggaagataaagctgttttggcttgcaaagacaagtctctgctaatttttgggatcacatgtcctgcatgaaataggtgtggaaatgtcaaatgcatgtctttaccctggagagcagcgtatacatagaaagctggaaggtgctttacagtgaagagagttaacttgttaatctgcaggtacaataatagtttatcccaggtgtgggccagttgttgttgagcaacattttgcttcttcaggattgactttctaggtagcttaactttcttgaaagaaagccctatgagaagattcccataaacgattgttgaagaaatatttccattcaattcccactctcagtaaattgtggcctgacttgtgtaatttaaagtggggatggccggcgcagtggctcacgcctgtaatcccaacactttgggaggctgaggcctcctatcattccaaacagaatgataatgatattagattttcaaaaatatatattattacttgacagtactaaaaatgggcagctctttgtcattttctaaaatgtgggtacgtgttatttgtacttaaaatctagaactgagcacccaagactttgagaagcatgaaggcatttggcctctagatcctagcagggaggcctatgggtctcaggagcccgtcaccagcctccgtgctccagagctcacgtgtggggtcttgttaggaggacccagaggtcagctaacttcatttgtttcctttccaagaaaagcaaagcgaagagcataacatatcttctctgtgctctcttttttacaaaatgagtacattattaatggaatcactctttttatgaggcctatgtaccaggatttcaagggaggaatctactgttatttcccaccatttgcacgttacatgtgagggctgggatggttgtctgcatgttagcaatatgtcaatcacttttcaaatattttcatttaacaggaatagctgaaatgttcaagaccccagtgaaggagcaaccgcagttgacaagcacatgtcacatcgctatttcaaattcagagaatttgcttggaaaacagtttcaaggaactgattcaggagaagaacctctgctccccacctcagagagttttggttggtttccttgtttcctaacactgtgatgttttgggataggaacatacagtattatttttttacaagcagtatgatattacttctctaaaacaaatgttcctggcacaaaataccatttccgtcttctctgttctaattgaaagggagatttcaatcagcagttgaactaacattggcattcattgacttatatagaaagaaagactccgttaatgtgtgtaaatgacctgtgtacacttttggcttctttattgtaagtaaccagggtgacatagcaaaaaaatacaatggtgtctcaccatatttacatataaattactcatattcaaaattactgccaattacaaaacagaaagataacagtttgtatactgtgcaattattcctgctaaccttttaggtgggagcaggcccggggtaagtgtgagatgggagatgagaatctgtctaatctctcatttggcactggtcactgtattcctgtcacagagggaacagcttgctaccctgaagatgtttgcggtaggtaaatatttcctgtgtaatatggaccctaaccacataaggataatccatgttattttattggcgatttaaggcaagaaacagctgtttgtttctaatgtttgaaggaaaaaatgcctatatttacgtcaatgacacagggcatggcaacctttggaggaaccttctgaagcagtatttttaccttctatgatcatttcagcatctaactttgcttaatgatgaccccactatagcaccaaataacattattcttaattgtgcatggctcttataagacagatttatagacacataagtagcctcatgtcgttcagtgaatacgaagctaaatatttagttttttaccatattttatgaggctgtaatactcgattgacatgagacactaatagaatgtttttattgtgtatgtttttatttcaggaggaaatgtgttcttcagtgcacagaatgcagcaaaacagccatctgataaatgctctgcaagccctcccttaagacggcagtgtattagagaaaatggaaacgtagcaaaaacgcccaggaacacctacaaaatgacttctctggagacaaaaacttcagatactgagacagagccttcaaaaacagtatccactgcaaacaggtcaggaaggtctacagagttcaggaatatacagaagctacctgtggaaagtaagagtgaagaaacaaatacagaaattgttgagtgcatcctaaaaagaggtcagaaggcaacactactacaacaaaggagagaaggagagatgaaggaaatagaaagaccttttgagacatataaggaaaatattgaattaaaagaaaacgatgaaaagatgaaagcaatgaagagatcaagaacttgggggcagaaatgtgcaccaatgtctgacctgacagacctcaagagcttgcctgatacagaactcatgaaagacacggcacgtggccagaatctcctccaaacccaagatcatgccaaggcaccaaagagtgagaaaggcaaaatcactaaaatgccctgccagtcattacaaccagaaccaataaacaccccaacacacacaaaacaacagttgaaggcatccctggggaaagtaggtgtgaaagaagagctcctagcagtcggcaagttcacacggacgtcaggggagaccacgcacacgcacagagagccagcaggagatggcaagagcatcagaacgtttaaggagtctccaaagcagatcctggacccagcagcccgtgtaactggaatgaagaagtggccaagaacgcctaaggaagaggcccagtcactagaagacctggctggcttcaaagagctcttccagacaccaggtccctctgaggaatcaatgactgatgagaaaactaccaaaatagcctgcaaatctccaccaccagaatcagtggacactccaacaagcacaaagcaatggcctaagagaagtctcaggaaagcagatgtagaggaagaattcttagcactcaggaaactaacaccatcagcagggaaagccatgcttacgcccaaaccagcaggaggtgatgagaaagacattaaagcatttatgggaactccagtgcagaaactggacctggcaggaactttacctggcagcaaaagacagctacagactcctaaggaaaaggcccaggctctagaagacctggctggctttaaagagctcttccagactcctggtcacaccgaggaattagtggctgctggtaaaaccactaaaataccctgcgactctccacagtcagacccagtggacaccccaacaagcacaaagcaacgacccaagagaagtatcaggaaagcagatgtagagggagaactcttagcgtgcaggaatctaatgccatcagcaggcaaagccatgcacacgcctaaaccatcagtaggtgaagagaaagacatcatcatatttgtgggaactccagtgcagaaactggacctgacagagaacttaaccggcagcaagagacggccacaaactcctaaggaagaggcccaggctctggaagacctgactggctttaaagagctcttccagacccctggtcatactgaagaagcagtggctgctggcaaaactactaaaatgccctgcgaatcttctccaccagaatcagcagacaccccaacaagcacaagaaggcagcccaagacacctttggagaaaagggacgtacagaaggagctctcagccctgaagaagctcacacagacatcaggggaaaccacacacacagataaagtaccaggaggtgaggataaaagcatcaacgcgtttagggaaactgcaaaacagaaactggacccagcagcaagtgtaactggtagcaagaggcacccaaaaactaaggaaaaggcccaacccctagaagacctggctggcttgaaagagctcttccagacaccagtatgcactgacaagcccacgactcacgagaaaactaccaaaatagcctgcagatcacaaccagacccagtggacacaccaacaagctccaagccacagtccaagagaagtctcaggaaagtggacgtagaagaagaattcttcgcactcaggaaacgaacaccatcagcaggcaaagccatgcacacacccaaaccagcagtaagtggtgagaaaaacatctacgcatttatgggaactccagtgcagaaactggacctgacagagaacttaactggcagcaagagacggctacaaactcctaaggaaaaggcccaggctctagaagacctggctggctttaaagagctcttccagacacgaggtcacactgaggaatcaatgactaacgataaaactgccaaagtagcctgcaaatcttcacaaccagacccagacaaaaacccagcaagctccaagcgacggctcaagacatccctggggaaagtgggcgtgaaagaagagctcctagcagttggcaagctcacacagacatcaggagagactacacacacacacacagagccaacaggagatggtaagagcatgaaagcatttatggagtctccaaagcagatcttagactcagcagcaagtctaactggcagcaagaggcagctgagaactcctaagggaaagtctgaagtccctgaagacctggccggcttcatcgagctcttccagacaccaagtcacactaaggaatcaatgactaacgaaaaaactaccaaagtatcctacagagcttcacagccagacctagtggacaccccaacaagctccaagccacagcccaagagaagtctcaggaaagcagacactgaagaagaatttttagcatttaggaaacaaacgccatcagcaggcaaagccatgcacacacccaaaccagcagtaggtgaagagaaagacatcaacacgtttttgggaactccagtgcagaaactggaccagccaggaaatttacctggcagcaatagacggctacaaactcgtaaggaaaaggcccaggctctagaagaactgactggcttcagagagcttttccagacaccatgcactgataaccccacgactgatgagaaaactaccaaaaaaatactctgcaaatctccgcaatcagacccagcggacaccccaacaaacacaaagcaacggcccaagagaagcctcaagaaagcagacgtagaggaagaatttttagcattcaggaaactaacaccatcagcaggcaaagccatgcacacgcctaaagcagcagtaggtgaagagaaagacatcaacacatttgtggggactccagtggagaaactggacctgctaggaaatttacctggcagcaagagacggccacaaactcctaaagaaaaggccaaggctctagaagatctggctggcttcaaagagctcttccagacaccaggtcacactgaggaatcaatgaccgatgacaaaatcacagaagtatcctgcaaatctccacaaccagacccagtcaaaaccccaacaagctccaagcaacgactcaagatatccttggggaaagtaggtgtgaaagaagaggtcctaccagtcggcaagctcacacagacgtcagggaagaccacacagacacacagagagacagcaggagatggaaagagcatcaaagcgtttaaggaatctgcaaagcagatgctggacccagcaaactatggaactgggatggagaggtggccaagaacacctaaggaagaggcccaatcactagaagacctggccggcttcaaagagctcttccagacaccagaccacactgaggaatcaacaactgatgacaaaactaccaaaatagcctgcaaatctccaccaccagaatcaatggacactccaacaagcacaaggaggcggcccaaaacacctttggggaaaagggatatagtggaagagctctcagccctgaagcagctcacacagaccacacacacagacaaagtaccaggagatgaggataaaggcatcaacgtgttcagggaaactgcaaaacagaaactggacccagcagcaagtgtaactggtagcaagaggcagccaagaactcctaagggaaaagcccaacccctagaagacttggctggcttgaaagagctcttccagacaccaatatgcactgacaagcccacgactcatgagaaaactaccaaaatagcctgcagatctccacaaccagacccagtgggtaccccaacaatcttcaagccacagtccaagagaagtctcaggaaagcagacgtagaggaagaatccttagcactcaggaaacgaacaccatcagtagggaaagctatggacacacccaaaccagcaggaggtgatgagaaagacatgaaagcatttatgggaactccagtgcagaaattggacctgccaggaaatttacctggcagcaaaagatggccacaaactcctaaggaaaaggcccaggctctagaagacctggctggcttcaaagagctcttccagacaccaggcactgacaagcccacgactgatgagaaaactaccaaaatagcctgcaaatctccacaaccagacccagtggacaccccagcaagcacaaagcaacggcccaagagaaacctcaggaaagcagacgtagaggaagaatttttagcactcaggaaacgaacaccatcagcaggcaaagccatggacacaccaaaaccagcagtaagtgatgagaaaaatatcaacacatttgtggaaactccagtgcagaaactggacctgctaggaaatttacctggcagcaagagacagccacagactcctaaggaaaaggctgaggctctagaggacctggttggcttcaaagaactcttccagacaccaggtcacactgaggaatcaatgactgatgacaaaatcacagaagtatcctgtaaatctccacagccagagtcattcaaaacctcaagaagctccaagcaaaggctcaagatacccctggtgaaagtggacatgaaagaagagcccctagcagtcagcaagctcacacggacatcaggggagactacgcaaacacacacagagccaacaggagatagtaagagcatcaaagcgtttaaggagtctccaaagcagatcctggacccagcagcaagtgtaactggtagcaggaggcagctgagaactcgtaaggaaaaggcccgtgctctagaagacctggttgacttcaaagagctcttctcagcaccaggtcacactgaagagtcaatgactattgacaaaaacacaaaaattccctgcaaatctcccccaccagaactaacagacactgccacgagcacaaagagatgccccaagacacgtcccaggaaagaagtaaaagaggagctctcagcagttgagaggctcacgcaaacatcagggcaaagcacacacacacacaaagaaccagcaagcggtgatgagggcatcaaagtattgaagcaacgtgcaaagaagaaaccaaacccagtagaagaggaacccagcaggagaaggccaagagcacctaaggaaaaggcccaacccctggaagacctggccggcttcacagagctctctgaaacatcaggtcacactcaggaatcactgactgctggcaaagccactaaaataccctgcgaatctcccccactagaagtggtagacaccacagcaagcacaaagaggcatctcaggacacgtgtgcagaaggtacaagtaaaagaagagccttcagcagtcaagttcacacaaacatcaggggaaaccacggatgcagacaaagaaccagcaggtgaagataaaggcatcaaagcattgaaggaatctgcaaaacagacaccggctccagcagcaagtgtaactggcagcaggagacggccaagagcacccagggaaagtgcccaagccatagaagacctagctggcttcaaagacccagcagcaggtcacactgaagaatcaatgactgatgacaaaaccactaaaataccctgcaaatcatcaccagaactagaagacaccgcaacaagctcaaagagacggcccaggacacgtgcccagaaagtagaagtgaaggaggagctgttagcagttggcaagctcacacaaacctcaggggagaccacgcacaccgacaaagagccggtaggtgagggcaaaggcacgaaagcatttaagcaacctgcaaagcggaagctggacgcagaagatgtaattggcagcaggagacagccaagagcacctaaggaaaaggcccaacccctggaagatctggccagcttccaagagctctctcaaacaccaggccacactgaggaactggcaaatggtgctgctgatagctttacaagcgctccaaagcaaacacctgacagtggaaaacctctaaaaatatccagaagagttcttcgggcccctaaagtagaacccgtgggagacgtggtaagcaccagagaccctgtaaaatcacaaagcaaaagcaacacttccctgcccccactgcccttcaagaggggaggtggcaaagatggaagcgtcacgggaaccaagaggctgcgctgcatgccagcaccagaggaaattgtggaggagctgccagccagcaagaagcagagggttgctcccagggcaagaggcaaatcatccgaacccgtggtcatcatgaagagaagtttgaggacttctgcaaaaagaattgaacctgcggaagagctgaacagcaacgacatgaaaaccaacaaagaggaacacaaattacaagactcggtccctgaaaataaggtgagaggaagtattacagcatcactcaatatcgtcttggatagttgtgaatttctgtgttatactttgcatgtaacctgacgttataagtggttatcctttccccagagggtttcctttaacactgaataactgcaggccatggtaaagaatcttcttgggacctatagagggaatagactaatatgggaaaagaactagtcaaacatgattaatgcaaacttagaagagtttctcaaaagccaaatgagtaatgttcatcttcaaatgtttaaaaaattgatcagaggataggtgggtggttcagttctatgttctggatactgtcaccaagaccaggactgggttaaaaatcctatctatgtcactattttaactatcagaacaatatcaataaggaatgtgtattcttgagaaggggaaactgtctggactgttagatagagaggctcccactgcatgcagagaagtttggggaaactccagaaatggcaatttcctgttctgccttagcagtgatggttaaaggaataggaattcatttactccctgtaaatgaatgaataacggaccttctttctataatgtaaactgtaaaaattagatttgatatatatcttattaggcattgttattgaaatttatcctgaattccttatttataatttgtcagcagagacagtcatttctccataggagcaaagtaccaaggcattaccttgactatcctagatgacaagtctcttagacaattcatcagtgtgtgattttcaaatgatttctccttttaggttactgttgattgtgctccctgttgaattttgaagtttgttttactaattattggaattttgtggatgtcttctcatttctttagggaatatccctgcgctccagacgccaaaataagactgaggcagaacagcaaataactgaggtctttgtattagcagaaagaatagaaataaacagaaatgaaaagaagcccatgaagacctccccagagatggacattcagaatccagatgatggagcccggaaacccatacctagagacaaagtcactgagaacaaaaggtgcttgaggtctgctagacagaatgagagctcccagcctaaggtggcagaggagagcggagggcagaagagtgcgaaggttctcatgcagaatcagaaagggaaaggagaagcaggaaattcagactccatgtgcctgagatcaagaaagacaaaaagccagcctgcagcaagcactttggagagcaaatctgtgcagagagtaacgcggagtgtcaagaggtgtgcagaaaatccaaagaaggtaagccatttactgtttccctgttttaaaagacacagaatgttttgatgtattttttgcccaaggttgcaaaggcaaacaaaaagcattatcttcaacagcactctgccagctcccagttacattaatggaaggagcattatgctaagacataaatttggtcattttagttatattttgttgtgtctactttgggaatttcacttcaaatagcaaattcacgttatgaagactttcttcagaaagaaaaggaatttgtctagtggctaatttctgactgcttatgatgtacctcatgatacaattgtaggtagatgtcttcagcctttctgtagttcaaaatcacctcttgaaacaggaaaattctttttccaaaaaaaactattgaaacagaaaaatttccaaggcattctttggaaaggcagaaggaacagaagttgggatgtccctgagacacatgctcactatgtgagagttcctggtcagtgggggatgcgtctgccctccaaccctcctccagccagagactatctaagctaatgaactttaagtgctactgaaatcacatcaagttgagccactcataattacaagcatgtggacaaatccataagaatgattagattccattagtgttcttctggggaatacttggtttagctaaaataaaaataggttgaattgctccctttttgtgagcaattcacaaaaatataatataaatttaattcttagcacacacaaaatttggacctaaaactaccatattctgagttcagcaaacgaaactcatgtagcaataacctcttcagatacagaattctggcaagtacagctgtccagacagaccctcttcggcacaaactaggaagcttcaactgccaagaaaaggaaagattcccaggtgtccccagtacctgctgcatagccaggcagccagtggagggggagggcttgtgtgtctggatggtgggcaggaagtcctagtggggagatgcccatagactgttccagagagggaagaggagaggctcaagaagggcactgatgcccacacaggtgtcctaagtcagagactgtacttctggggcaggctggaagcagaagacacccgacagtgccagacaaggtcctagaaaccacaggcacaccagggacgcaacagctgacgtgggtcagcacgttcacccgtcgagtcttacaataaaacgcaggctccaggcgcttaccgaattcacagtctggaaggtgctgcttcctcagaatgaaaccaaagaagggtgaaagcgaatcttttaactaggatgattcctaaacacagagcaaccaggcccaaggctgagccaggcctggtgtgttctgccgggggcgttccagcctcttctcacacacaagcacccaggagacgcccaacacacacatgctcctctttgccgagctcttcggtgggtgtcggtagtcctagaaaatgcatatataagatagattttttccagtaagaagcttgtagccatgcttttcaccatggttcctctcccttagccaaggggtgagaactactgcaagagtaaaggccaaggcaggtctcctgcatgcaagttgggcatgcttctgtctacaggggttccttggtttaggagacccaaaagacttaatcctggttggattcactttttctgagtgacattttttagtttgtgaaaatgtgtgcatcgatgaagaaattttattatgaattagcttaaaaatgcattaggaacttctgtatgaaaagatcacattatttaagtgtaaaaaaactgcataataaaagcagttcaagtcaagaaaaacaatgttaatggaatatattttaaaacttatttccaacctcaaaattaattttctgcaactaaggacctgcataatacctagtaagcctttggggttttgcagaggaggtcgattctaaaaatgggtgtttaaattacttaagagttctattttttttcttcccacacaggctgaggacaatgtgtgtgtcaagaaaataagaaccagaagtcatagggacagtgaagatatttgacagaaaaatcgaactgggaaaaatataataaagttagttttgtgataagttctagtgcagtttttgtcataaattacaagtgaattctgtaagtaaggctgtcagtctgcttaagggaagaaaactttggatttgctgggtctgaatcggcttcataaactccactgggagcactgctgggctcctggactgagaatagttgaacaccgggggctttgtgaaggagtctgggccaaggtttgccctcagctttgcagaatgaagccttgaggtctgtcaccacccacagccaccctacagcagccttaactgtgacacttgccacactgtgtcgtcgtttgtttgcctatgtcctccagggcacggtggcaggaacaactatcctcgtctgtcccaacactgagcaggcactcggtaaacacgaatgaatggatgagcgcacggatgaatggagcttacaagatctgtctttccaatggccgggggcatttggtccccaaattaaggctattggacatctgcacaggacagtcctatttttgatgtcctttcctttctgaaaataaagttttgtgctttggagaatgactcgtgagcacatctttagggaccaagagtgactttctgtaaggagtgactcgtggcttgccttggtctcttgggaatacttttctaactagggttgctctcacctgagacattctccacccgcggaatctcagggtcccaggctgtgggccatcacgacctcaaactggctcctaatctccagctttcctgtcattgaaagcttcggaagtttactggctctgctcccgcctgttttctttctgactctatctggcagcccgatgccacccagtacaggaagtgacaccagtactctgtaaagcatcatcatccttggagagactgagcactcagcaccttcagccacgatttcaggatcgcttccttgtgagccgctgcctccgaaatctcctttgaagcccagacatctttctccagcttcagacttgtagatataactcgttcatcttcatttactttccactttgccccctgtcctctctgtgttccccaaatcagagaatagcccgccatcccccaggtcacctgtctggattcctccccattcacccaccttgccaggtgcaggtgaggatggtgcaccagacagggtagctgtcccccaaaatgtgccctgtgcgggcagtgccctgtctccacgtttgtttccccagtgtctggcggggagccaggtgacatcataaatacttgctgaatgaatgcagaaatcagcggtactgacttgtactatattggctgccatgatagggttctcacagcgtcatccatgatcgtaagggagaatgacattctgcttgagggagggaatagaaaggggcagggaggggacatctgagggcttcacagggctgcaaagggtacagggattgcaccagggcagaacaggggagggtgttcaaggaagagtggctcttagcagaggcactttggaaggtgtgaggcataaatgcttccttctacgtaggccaacctcaaaactttcagtaggaatgttgctatgatcaagttgttctaacactttagacttagtagtaattatgaacctcacatagaaaaatttcatccagccatatgcctgtggagtggaatattctgtttagtagaaaaatcctttagagttcagctctaaccagaaatcttgctgaagtatgtcagcaccttttctcaccctggtaagtacagtatttcaagagcacgctaagggtggttttcattttacagggctgttgatgatgggttaaaaatgttcatttaagggctacccccgtgtttaatagatgaacaccacttctacacaaccctccttggtactgggggagggagagatctgacaaatactgcccattcccctaggctgactggatttgagaacaaatacccacccatttccaccatggtatggtaacttctctgagcttcagtttccaagtgaatttccatgtaataggacattcccattaaatacaagctgtttttactttttcgcctcccagggcctgtgggatctggtcccccagcctctcttgggctttcttacactaactctgtacctaccatctcctgcctcccttaggcaggcacctccaaccaccacacactccctgctgttttccctgcctggaactttccctcctgccccaccaagatcatttcatccagtcctgagctcagcttaagggaggcttcttgcctgtgggttccctcacccccatgcctgtcctccaggctggggcaggttcttagtttgcctggaattgttctgtacctctttgtagcacgtagtgttgtggaaactaagccactaattgagtttctggctcccctcctggggttgtaagttttgttcattcatgagggccgactgcatttcctggttactctatcccagtgaccagccacaggagatgtccaataaagtatgtgatgaaatggtcttaaaacccatggtatttttattatagggagagtggggaaagaaactaagtgtgggtggggcagacaggccagtgtaagagagactggttcattacgttccattttcatttctacaaggacttggctggatggtcattttctctcttggccaataagtcatcgcagctgcttttagtcctgcaggaatggcctgctgtatctcgagaactacctgcaaccgcagctgtgcctgctttgttgcaacagaggtgctgagttgagggatggggatttgacccagggctgccccaagtcagcagatgaaaatacatgccctgactttcctctggcaaccctgatttgacatggatcccgggagtgaatttgctggcaagttccaggggcagtagcctgcggtaggtcagttagtcctgaagaagaggcctttctgtcggagagaaaagtttgcaggtgggtgcatctaccatcttgagaggctgaggagggagggagagccgtgctcggtggtcagtctggtgaaggaagtgggttcagtctgcagcccacatcctgggctgtcatcaagaattaacatggcaaacggcgactccataaagtaaactgta

SEQ ID NO: 20 - DNA, 78139 bp, Homo sapiens
cggcgccacagctgagccgacctccggggcccgcgccctcccctccccgggcaccactaggagcggccagcccgggcctcggctccgcgcgcggggaaacgagcgcggcggttaaaaccgttaccacccccgagttttgaactggttcaaacttggcttccagcacccgccccgcccctcccccgcccgggaactctgcggcgccggttcccgccaagagccgccggcgcttcgtcccgcccttcggccggttcccgccacctatcctccccgcctcccgtccgcggcgggctccgggcccccgcgatgtctcccggtccccgcgtgcctgcacaccgccttcctgagaggcgccgtgtgttcagcgaaagaacaaagagacggcggcggcgcttccacacggccagtggcgtcccttacagcgaaccccgccgccgcccgcgcgcgcacgcgctgccagtgcccgcccgcccacgagccctgagcgcactctgcgtggggctggctcggcgcctccgagcccggcgggccctgtgattggacgggcgcccgcctcgcgtcccgccaatcggggcggcgcttgattgggctgggggggccaaataaaagcgatggcgattgggctgccgcgtttggcgctcggtccggtcgcgtccgacacccggtgggactcagaaggcagtggagccccggcggcggcggcggcggcgcgcgggggcgacgcgcgggaacaacgcgagtcggcgcgcgggacgaaggtaacgcgccgctgcgggcggcccggccggcggggctccgggagtgcgaaccgggcggcggcggcggcgccaggacctccccgccactgctgtgccggtcccgggtatcgccgagcggggctcaccggggcgccgcgtttgtaggcgtgcggggggtggagggtgaggggagagcccccctccccggaaggagctgtgagcttcgggctggcccgcgggaccctgcgagtgaggcagcgcacacccctggagctgcggggcggggggcgtgtggggggctcctttcccggtgcttgtcctggccggggcgccggggccggggtcggggcgttccggtgcccggtccagggtggcagctcgagcctcaagtctcctttgtgtggcgcggccgcggcgggagcgcccgggtgggacgggacagacacaagttggtgggacccagccgccgagtccgcactcagacaaaggacggactgtgtctccggagggctcggcgcgaggggaaggggcatgacacccgggcccgccggcgggcgggagaggggcgtggggaggcgcgggccgctgccggggtgggcagggctcggccctcgcctcgcgcacgcccccggtcccgggcgcgccgaccccgggctggggccgcggcgctcgcgggacgacgttcgcggcggggaactcggagtagcttcgcctctgacgtttccccacgacgcaccccgaaatccccctgagctccggcggtcgcgggctgccctcgccgcctggtctggctttatgctaagtttgagggaagagtcgagctgctctgctctctattgattgtgtttctggagggcgtcctgttgaattcccacttcattgtgtacatccccttccgttccccccaaaaatctgtgccacagggttactttttgaaagcgggaggaatcgagaagcacgatcttttggaaaacttggtgaacgcctagtgagttgccactttctaaagaatcgtaatccttaaacattacaagctgttttggccaacttgtgtgatacatctgagaatggcgacaggtgctaacgaaatcaactgtcattcagccagattattccccaaatcccgacgggttgaatgaggatgaggtggtagaagtaggtgatcaaaatagaatggctatgacaaatgtgtgtttagattatacggttagcagtttcttattaattggtctcgttttctgtgaacaatagctttggtgattcagaaaagactgcatggagaaatgtttgttgcctaagaaatttaacgtgtgctgtccacagttaaacttcctttatcacacaggatctgtaacatttaaattcatttggaaataaaaatgtgtctttgctatttacttaaaggcttgctttttagggttcaagcaagttattattagtttaattttgtggcgttttgatgtcatcataaaacagcatttaataaacctttgaaaaacacgaatgctgtcacaattgaatgtagtttatacttttaggggttttggagtttattttctattactcttcataagcattagcaactaattcatgtttaggaatactgtacaagtgtgtaatcctaacttgtttatttgtaattttatttgcaggaaaacaagtatttaagatatattttaattttctattcatggtctctaaagttaggaataggtaggattctagtcatagatataaagcgtcttgttctctcttttcggaggtgtgttgggtgatgtaatatttaaggtttcccggaaacaggaacactgcatcttaaattctcgtttttgtggaaagtgaatatattccaagaaaacaagttagaaaaacataggcgttcttctggttgcactgtcctatatgataaagatctaatgtgcatctgctaacttaaggtttcataaaaatggagacaaataaatgcaatataaatttattacatatattttggagagtgttgacaccactgtacgggcattccaggtgctggtctaagtgttgagacattataacaaaaaagtaacgtttatattagttactattaattctgtatttaaaaaatcctattaataatcttgtccattatgagataaggtagttatgcagatttttggcagaaattcggatattttaggatacatatgtgtgtgtgtgtgtgtgtgtgtgtgtgcgcgcgcgtgtgtgtgtgtgtatatgtttttttttttttgagacagagccttgctctgtcgtccaggctggagtgcagtggctggatctgggctcactacaatctctgcctcccgggtttaaggaattcccctgcctcagcctcccgagtagctggaactacaggcacgcaccacgacacccggctaatttttgtatttttagcagagacagggtttcaccatgttggccaggctggtctcgaactcctgacctgaagtgatgtacccgcctccgcctcccaaaatgctgatccagacgtgagccaccacgcccagcctaggataaaaatttctaactttgcccttgagtgttctctgtatttgataattactattctttgtacttgccatgagatattttgaaaaacatctctttggggaattggtttaaaaattcatattaaattattttctggtacaattgagaatgtatttagtcagtttaagtagcagtgacttaaaacacacttgttgatctagtgtagttagaaaaagttctgatactttgatacctagctttgccttgcacaaatacatttaagtgaatatctttatgttggccatttaaaaattttaggcaaatttctccaagtcatactggaattttcccaggataccttccttcttttgaggtagtgtgctcaaggattctgaatttatttcagtattaccctttacatgagcagtgattgagaaagttgatctgctttttaaaaaccaacaaggacaaatcctccaatataatgtattctgtggttaattagcaatgatttatggattagccttgaagtctttatatcagtatagatgacaaattttctgtaaatcatgatagattctatatgagtaggtgaaatcttcgggggagagcataagtgaacagcagcaattcattaaattcagagaaaggttcatggtcagatgatacatactttaccttctggaggtcttccctgaattcccactcttgtgttcccacagggttttatcatattttattgtagcatgactcaattgtattgtaatcacttgtttatgcatccctctcttccctacagtcaaagtgcctcctggtagaggctctgtcttatttttttctttgtatacctagtacctacgttggtatttgctagagaataggggttttaaatatagttgaatgaattaaggaaatatgaaaaatgtagggaaataatttgacaaaggaacttgcaaagtgaacaggatatgttagtattcatgtgaggaactttgaaatgtgtttttctccctctttaatagggaatgattacaaagaaaaatagttgtcaaggtgaacaagttccaagtttttcctagttataatctgtagtactaaacattagatatcctttagatgcaactattacactcggacaactggagagaacttgatgaatcatctggatatttagtaatagtatttgcttaatttgatttaatgttgatattgatgatctctttgcaaaaatataaggaagggaaagggcgagagagggtagtagatcttttaactgaaaagctgttttgttataattcatgagttctttattggagtaaattgaggtaggttttggagctaaaactgaaggatgtagcgacagtgtaattggatcatttattgggatgcttttcatcattcttttaaaatgatttaaatacagattagcaaatttagtgatacctcaaaagttacagctggtaaatttctaagatagttgcaccattccatatcttgccactgttccactacttggtataaaaatatgacaaatttgtgtttagattatgtggttagcagtttcttaataattggtcttgttttccattaacaatagcaagacagaacaagatcatagctcactgcatccttaaactcctgggctcaagggatcctcctgtctcagcctcctgagtaactggtattaccagtgcacaccattgtggtgacttatttaattttttaattttttgtagagatgggatcctgctttgttgcccacgttgatctcaaactcctggctccaggcaatcctcctgccttggcctcttaaagtacagggatgacaggctgagccattgtgtttgacccagatactttttttttttgagacggagtctcgaaagtgattcttgtgcctcagcctcctgagtagctgggactacaagcgtgcgccaccacgctcggctaatttatttatttattatttattatttatttttttgagatgcagtgtcactctgtcacctagactggagtgcagtggcaccatcttggctcactgcaacctccacctcctgggttcaaatgattctcctgcctcacctctcaagtagttgggattacaggcatgcaccaccaggcctggctaatttttgtatttttagtagtgatgggatttcaccatgttggccaggctggtctcgaactcccgacctcaggtgatccacctgccctggcctcccaaagtactaggattacaggcgtcagtcactgtgcccagcctccgataatttttatattttagtagaaactgggtttcactgtgttggccaggctggtctggaactcctgacctcaagtgattgacctgcctcgtcctcccaaagtggtgggattataggtgtgagccaccacaccctgctgtgttgtttttgtttttgttttttgtttttgtttttgttttttgatatggagtctcacacttgttgcccaggctggagtgcagtggcgtgatctcggctcactgcaacctctgcctcctgggttcaagcgattctcctacctcagcctcccgagtagctgggattacgggaacgcaccaccacacctggctaatttttgtatttttagttgagatggggtttcaccacgttggccaagctagtctcgaactgctgacctcagatgatccgcctgcctcggcctcccaaagtgctgggattacaggcgtgagctactgcgcacgcctggcctggatactttttaaacatttttaaattaaaaatttttttttggagacagggtcttgttgtcacccaggctggagtgcagatgcgtgatctcagttcactgcaacctctgcctcctgggctcaagcgatccttccatctcagcctcccaagtagctgggactacaagtgcatgccaccacgcctggctaatttttgtattttttgtagagacagggttttgccatgttgcccaggctggtcttgaactcctgaactcaagagatccacctacctcagcctcccaaagtgctgggattataggtgtgacccactgcacccagcttttgtttttaatatttgtaagaaccaccttgtgtctgccaacaggcgaattaacaaaatgtggtatataaaccaatgaaaacataaaaggagtgaaataaagacgtaaaaggagtgaaatttcaaaataaaagtaaaaagatttcaaaataattcagacataaaaggagtgaaattctgatacatggatggagctggagaatattatgcttagtgaaataagccagatacaaccttttgtacaaaaatacaaaattgtatgatctcatttatatgaggtagttagaagaggcaactctatggagacagaaagtagaatagaggttaccagggctgtgaggggagaggtgaatggggagtttaatgaatacagagtttctgtttggaatggtgaaaaaattctggagatggataatagtgatggttgaacaatattttgaatatatttaatgccacagaattgtacacttaaaaatggttaaaatggtaaattttacacgatatgtatctgtatctatatatatctctctctatatctatatatcttaccagaatacaaaatttaataacacactccgaaaacctttacagatgaggaaactgaagaaaactgtctacaggggaggagttaagaatttgcccaggattattcagctgggaatttgcattcgggatccaaacttagttctgtttcactacatattatctactccatattatctgttctgtgttatctgctggctttctgggtgattaaagatatgtcagctccgagaagaatgagtttatttgaatcattcagaaagttacatttaaaagtaggtaattgtagtttgatggaaggtacagtgtgaaaccctagacagactaaaggttaactttgaggatttctttctcagccagagtggtaatagtatgcatttgagaggggaggagagtagagttctaaggatgtggtctttggagacagtttcttgggttccagtccctgagctaccaatttgtgtctggggtgttatcctcttgatgtcttagcatccctatctgtaaattggtgaggataatgataacatctgataaggtggttgtgaggattaaaggaattgatacatgtgaaatccttagaactgtacctggcaaaaagtgtttgataaatgattttcagttattgtgccaatattattttagagttgatgtactttctcattaatggaaccaaacacttctcaagttaaaattacgtgcttaggactggtaagttacaaaaatggtaccacacgttttatctatttcaatttagaaatgtctgttgattaaatgtgttcgctttaaactactgaaacaatgtagacatttataaaatgaaagcgtattgatccctgttatctcattcgctacctttaacggtttggtgtatattcttccccaaattttcaaatatattcatatatgaatatgtatttttacatacattttataaaaatgggaccaagttatttggttctaacatggcttttttttaaggtcaatacaaagatctgttttattaaaaaataattgatattcctttagggctcactatatgcttggtactcttctaagtcattattttatatagatactataatatcgagagatggagagattaagtaacaactagttagtggtagaggaaggattttaatttgggtacgttagcttcaaagtcctgatctcccagccagggatcatttttggtaaggcctgtgagctggaaacgttaacacttttaaaagagttgtaaaacaataccaccccacttccctgaagaacatataagggagactagataccgcctgccaagcctaaaatacttaccatgtggccctttacagagaaagtttgctgccccttgctctaagccatccagctgtacctctttggtgtaaggggggtgcatagtattccagtttatgaatgtgcattacgcagcaaaccaatctgttgtgattgacattgttttctctcctgaaaagaagtgaacatccttatgtatctttgaacatttgtgtgacaattttctatagagttggctctttcaagattatgaacatttctagttttaataggtgttgtcaagttatattaatttttagttaaaacaacaactgtattgaagtataatttacatacaataaaaagcacacatttgaagggtatgatttgaggagttttgacaaatgtatgcacctgcaccgctgcctggatcaagatctataatggttgccatcatctcagagtcctttcatcctcttttacagtcattctctcaacttttttttttttccctccaagatggagtcttgctctgtcacccaggctggagtgcaatggcatgatctcggctcactgcaacctccgcctcctgggttcaagcaattctcctgcctcagtctcccgagtagctgggattacaggcgtctgccaccacacccagctaatttttgtagttttaggcgagatctcagctcactgcaaccttgacctcctgggctcaatcgaacctctcacctcagcctcccaagtagctaggaccacaggcatgtaccaccatgcccagctaacatttattattaatatttttttgtagagatggggttttcctgtgtcgcccaggatggtttccaactcctgggctcaaatgattctgccttggcctcccaaagtgttgggattacaggcatgagccgcggcacctgacttgtagtaaactctctgaattaatattccattgtaggcatgtgctacagtttttaaattcatttacccatggatggacacataggactgttgtcagctgttgataaagctgctatcaccatttgtatgtctttcctggacatgttttagtggtaaatattgattttactttgtaagaaaccgttaaactcttttccaaaatagttgtaccattttaaattgaaagttacagttgtaactgtgcaggagttacagtttcttcacattttcattgacacttcgtgttgccagtcttttaaattttggccatcaaatgagtattaagtatctcattgtgggtttgtgtttctcagatgatcaatgatgttggaacatcttttcatatgcttattggccatttgtgtactttttttggttcaagccttttgtccctttaaaaaattggattgtttgtctggttgagtggcaagaggtctttatatgttctgggtacatagtcacattatctgtcagattgtgttgcaaatattttattgttcatttttgtttgattttgtgtatttttaatactataaagatcaagttaaaactttaatatgggaagcataatcagataaattatgtgaaacaaattgtccttaattcacgagtcatttaattagtgtaacaaaatgttatgcatttgcagaaacttgtaaactaaaaggatattattcatatgctgttaggtgtatggatgataattttttttaattaaactagttttgaaaattattgtatttagtaattctcttcattttgcataattcaaaccttttcatttattagtgagttaagccttaaattttttcttcaaaggataaatgagaatattaaaagtaaaaagtgaccttgatcttagaatggggtatgtagaaatgatgattgccaaacttagtttccctactttgacaatcaagtaaaattttttttttttttttttgagacggagtcttgctctgtcccccaggctggagtgcggtggcgcgatctcggctcactgcaagctctgcctcctgggttcacgctgttctcctgcctaagcctcccgtaaatttttttattatagaaatggatggcttttcagattatatatacttggtttctatacactattttatttttgtaaagtagcagttcttttgctcaacacctgaattgcccccacaataaatttttagtttttcttcaatattcaagtaatacataacttttccttttcctgtttaacaaagaaaaaaatatataaagcaagctgttggacctccattgggtgttgtttaccaccactgtaggtgatcgtggcattgtccacctcagtcttctcatggctgtggattcaagttaagaaattcctgaaggtagcattccaggtagtctgtagaacagcccaaactctctgaattagtattatctctgataggtgttttttttttctttgcttttttatttgagacggggttttgctctgtcacccagcctggatttcagtggcacaatcttggcttactgcaacctccacctcctgggctgaaacaatcctcccacatcagtctcctgagtagctgggaccacaggcacatgccaccatgcccagctaattttttatatttttgttagagacagagtttcactatgttgcccaggttggtctcaagattcctgagctcaagcgatgttcccatcttggcctcccaaagtgctgggattacaggcatgagccgctgtgcctggccctggtagttttcttcttatatctttctcctgttgatctcacttgattttcttactagtctacaggaaatttcacgtggagattctgtgcctgtcctctttctggaatatcttccttattttagcatctcaacatgctgttcagcttctggcttgaaaccacccctctcccatcccaaccaagttaagcagcttctttcctgcttagaagtaccataacatgtgtattaatctttttttttttctctctccttcccttcattttaagctcctttttattaatctgtagggcagagcttagaaaaaggtttttgtatattgtaagtactaataaaatatttgtgaagttgatttgggacttgggagacctctcttctgtaagcaactcaataaataattatttaagtaccatcctcacccagtgtactgttagctgctgttatgatattgattactgtaaaattttaaagtatatccttggtagactgttgatcaaagtcagaaagcttgagaaactctgaggcaaaaaaaaaaaaaaaaaaaaaaaatgaagagcatgaaatgattctgcaaactgatcttacaatgatctttctttttttttttttttttttgagacagagtctcactctgtcacccaggctggcgtgcagtggcaggatcttggctcactgcagtctctgcctcccaggttccagtgattctcctgcttcagcctcccaggtagctgggattacaggcacacgccactacgcccggctagtttttgtatttttagtagagatggggtttcactatgttggccagactggtcttgaactcctgacctcaggtgatctgcctgccttggccttgcaaagtgctaggattacaggcatgagccaccatgcccggcctctttttttcttttttcttttcttttttgtacacagtttcactctgttgcccaggctggagtatagtggcgtgatcatagctcactacatcctcagactcctgggttcaggggatcttcccatctcagcctcccaagtagctaggactatagacgtgagacacgatgtctggctaattttttacattttttattttttgtagagttggggtcttatatgttgcccagggtggcctgccaccttgtcctcccaaagctgggattataggcttgaatcagatcccagtgatctttatccctcagctgcatttatatgggctaaattcatacatagtatatcaagatgtcttcaggaagtttaaaaaaaaaaaggtatcaaaaagacagtatgtcatgactgctttatctattttagtctcttagtttttgatactaaagactagaccggagaaatgctttaacaaatcacaaaaatctaagaaaatagacagttaattatttttaaacagtggaagaatttcaatcataattaaagcagcttttgtattttttgatgtcatagcctatagtgaaatttcatatattctgtttgtagatacatgagttcctacgatatgcttgcacataatagaactaattactatttgttgagaacctaacctgtacctaatatacatgtagtttctaaatcaaacattttactttttttaaaaattgtaaaaagcccatagtaaattaatcatgtttaccatttaaaaatgtacagttcagtagtgttaaatacattcacattgttgcacaacagatctctagaacttttttgtcttgcagaactgaaattctgtacccattgagcactaattcccacttccccctccccccaaattcttggcagccacctttctactttctgtttccatgatttttgactgttttagatacttacatgcatgggattaaacagtatttgcccctttgtgattagcttattttgcttagcataatgtcattgaggttcttccatgttgtagcatgtgacagaatttttttcttttctgtaaaggctgtatactatttcgttgtatgtatagactgcattttaaaatccatttatctattggtggacatttgggttgcttggtgatttggtgattcactattcatggttagccaggagtaatatgcagtaaatgttggtatacaaatatctctttgagatcctgctttgaattcttttggatatatggttgcccattgaacaacacagctttgaactatgtggatccatctataagtggatttttttcaaccagccatagatagaaaatatactattcggctgggcgtggtggctgatgcctgtaatcccagcacttgggaggctggggtgggaggatcagttgaggccaggagttcgagaccagcctggacaacatagtgagacctcatctctacaaaaaataaaaaagttagctaggtgtggtggcatgcgcctgtagtttcagctacttaggaggctgagacaggaggattgcttgagcctgggaggtcgaggctgcagtgagctgttattcatgccattgcactccagccagggcaacagaacaagaccctgctcaaaaaaaaaaaaaaagaaaatacactatttgtgggatgtgaaacttgtgtatagggtgggtgggctttttgtatatgcaggttccataggtcagatttgggggtttgagtatgagtgaatttggatgtatacaggtggtcctggaaccagtcttattcttcctcttcttttttttttttttttttttttaattattcgtcttttattttttggaaccactcttctgcatatgctgtgggatgactgtatatccagaattgtgattgctggatcatatggtagttctattttaatgttttgagtaacctcagtactgttttccataatggctgcacgatttttacagtcctacccacagtgcacaaaggtttcgatgtctctgcatccttgccaacacttgttattttctgtttcttttggtagtggccaacataatgggtgtgaggtgctatctcattgtggttttgatttgcattaacaatgttgagtatccttcatgtttattcaccccaaatattttacttttgaatttattgaaaatcatgcattttaattatgtaaaactcaataccatgcatcatttgttaaatgggaaaaggagaatttgtccttatgactattataaaatattctaataaggtgaaccttttttttttttttctttgagacaaggtctcgctgtgtcatccaggctggaatgcagtggcgcagtcttggcttactgcagcctctgcctcctgggttcaagtgattctcctgcctcagcctcctgagtagttggtattacaggtatgcaccaccacacctggctaatttttgcatttttatagagtcggggtttcaccatgttggcctggctggtaataagatgaactttatacttttttttttttttttgagacagagtcccactctgtcacctaggtgcagtggcacgatgatggctcactgcagccttgacctcctgggctcaagtgatcctccacctcagcctctcaggtatctgggattacaggtatgcaccaccacccctagctaatttttgtatttttttgtagagatggggtttcgccatgttgccccggctggtctagaactcctaggatcaagtgatctcccaccttggagtccccaggtgctgggattacaggcatgagccactgcattgggccagaactttatacttattaaacagtatgctgatgataggaaaaaactgtgcaatccttattcataaaattctgatctaaaacgtgttatattaaaattaattaataatgcaagcaaaattggcaaatttatttgtaaaccccattttgggctacttcgaaaattatttatggatcagaaaaggttgggaaatacttttctagagtaattgagcaggccctgtagatggcagaagtgttgcttgaactggcgtagaggaagaaagtgttgaattgccccacttaattccttaagtaattttgcctctttggagaatatttgcctgaaatagagaactcaagttatgctatgaagattctttttgaaaaatagagacagggtctcacattgcccaggctggtctcaaactcgtgggctcaagtgaccctttcaccttggcctcccagagtgcagggattacaggcatgagccatcatgccagaccaagaagatattttggagggctacatcccaccagtagcttgatgttgtacaaagagtggtaggctctgggcgaggctctgccattatactagttgtatttccttggcacgtagcttttgtggatctctcctcttcatggtgacatgaatgagatgaataaataatggaacaacttgtgtttactgagtatctaccatgtatgtgcctgcagagaggatgtcttcattttgcagatgaagtaattagtaaataacttgcctaggttccctcaggtagtgggcccttgaagaatgggcttttatggccaagtgcattggctcacgccagtaatcccagcactttgagcggctgaggtgggaggattgcttgagcccaggagttcaagaccagcctggacaacaaagtgaggccccatttctacaaaaaattagccacatgtggtggcatttgcctgtagtcccagctgcatgggagagtgaggtgagagggtcgcttgagcccagaaggtagagactgcagtgagccgtgtttgcacccctgcactccagcctgtgtgacagagtgagactgtgtctccaaaaaaaaaaaaaaaaaaaaaaaaggctattgctgcctatagggtcctttttagtgcaaatactaggattctaagcacttggtttctgttacccaggtcaaactatttctttggagagtttgattaccatcacaggtgatggtaagattctccctagctggcatttaatccagtggttatatgcatctttcccaaattctttatcaagttggtcaattcatagaacatctaatgctgattataagcctattatcttgcttgtgtctctgcactatgggcataatagcacctaaaagcttttgctataatggactatgatgtatctgaataaattacctttataaacaatcaaatctaaattggcaagttcaaatttacccaatttttcttatagaatttacctttgcagttaaagaaataattgttttttaccatttgtctagtatgacttgttatttacaaatagcatgtaactggccagctgtactatacacattttctagaaaagaaaatttcttcaaatttcttattgggtgccttagtcttttacccattagggctattcaaataaagaatgagatattctcttattctctagaaagagacattctatactaatggaaataccaacttttaaatctagactaccaaaaaaaaagtcatgtttttctaccctagaggctatagattcttaatgtcagccactcatcctggccctctcattttcttcttttcccatatggaagttctagggtgatatagtttggctctgtggccccacccaaatcacgcgtcaaattgtaatccccaaagttggaggaggggtctggtgggaagtgattgaatcatgggggcagacttttcccttgctgttctcctgacagtgagttctcgtgacagtgagttctcgtgagatctggttgtttaaaattatgtagcacctgccactttgctctctcttccccctgcatcagccacgtataatgtgctggcttcccctttgctttccactgtgatgataagtttcctgaggcttccccagccatgcttcctgtatagcctgctgaactgtaagcaaattaaacctcttttctttataaattacccaccctcagctctttatagcaatgtgagaatggactaatacagaaaatatgtaccacagaagtggggcatcacaataaagatacctgaaaatgtggatgcagcttttggactgagtaatgggcacaggttggtacagtttggagggctcagaacaagacaggaagataagggaatgtttggaacttcctagagacttgttgaatggttttgaccaaaatgctgatagtgatatggacagagatggctaggctgatgaagtctcagatgaagatgaggaacttattggggaactggagtaaaagtcactcttgctatgtgttagcaaagagactggcagcattgtgctcctgctctagggatctgttgaactttaaacttgagatgtttagggtatctggcggaagaaatttctaaaagcagcaacgtgttcaagaagtggcctggctgcttctaaaagcctgtgctcatttgcataagcaaataaatgacctgaaactggaacttaaatttaaaagggaagcagaacataaaagtttagaaaatttgcagcctgccatgtggtagaaaagaaaatctcactttctggggagaaattcaagctggctgcagaaatttacataagaggacgatacatggggtaaaatgctttttcctcccctaaaagccttggtattaatctggaaatagcaggaaggtaactgtaggaattatataatgggtttccctgtgcttggtcatgtctttgtatcatttccataggtcagtggagactcagaaaaccagtttctctgggcttttgataagtaatgttatagtaatcaacagatggtaactttcggtaaaacaaattgtcttcatctgttttgtgctggtataacggaatatctgagactgggtaatttttaaaattatttatttatttatttttgagatgggagttttgctctttttgcccaggctggactacaatggtgcgatctcggcccactgcaacctccgcctcctgggttcaagtgattctcctgcctcagcctcccgagtagctgggattacagttgcctaccaccatgcctagctaattttgtatttttagtagagacagggtttcaccatgttggccaggctggtgttgaactcctgccctcaggttatctgcctgcctcggcttcccaaagtgctgggattacaggcgtgagccaccacgcctggccaagactgggtaatttataaagaatagaagttggccaggcacagtggctcacgtctgtaatcccagcactttgggaggctgaggcgggtggatcacttgaggttaggagttcgagaccagcctggccaacatggtgaaaccccatctctaccaaaaaataaaaattagccgggtgcgttgatgtgcacctgtagtctcagctacttggaaggctgaggtgggagaatcacttgaacccaggaggtggaggttgcagtgagacagaattacgccactgccctctagcccaggcaacagagtgagaccctgtctcacaaaaggaataaatatatatatatatgcatatatgtatatatatatgcatatacgtacatatatatgcatatacgtatatacgtatatgtatatgtatatatacatatatgcatatatattatatataatatatagtgtatacaatatatgtatatacgtatatatatgtatatatgtatatatatgtatatacgtatatatatgtatatacacatatatatgtatatacgtatatatatttttcacagttttgggggctgggaagtttaagatcaaggtacctgcatctcatgaaggctttcttactgtgtcctcttatagcagaagatagaaggggcaagctgggaataactccctcagtcagactcttgtataagggcattcacaaggcaggaaccgtcgtggtctaatcacctctgaaaggccccatctcttaatactgttacatggacaacacctgagtttttgagggacaccttcagaccatagcacagatactgacaagtctcatcaattattaagtaaatagtacttgaagggtttgaaattttgtagtaccccggcagtgtgtttatatttgtgataaattttaagtataggaaaatcatggaaagacttactgctcataactgccgtacctcgtttacctctatctttccctaaactactactgttcttagcaagatcatgaactgtggggccgacataagccagaggagtttctgaagagtctgcttcagtgaggggttctgttgatagccatagaataaagaaatggcactttgcagacattggtacttccttgaaagaactggctgtggcatatacagaactcaaaaattgaaattactagataatggttacttggtttagattgcctggaaattatgagaggttctgtaaatgctttgggattagtagtttgaaccacctagtccattttatgattctgtcttcagaatatagaaggaattgcatcttatttggggattaggatataaagttagtgtacaaggcaaaatagcatgtaggcaaagttacccatgcagagtttgtgggaagatgccttaccacaaaccagtaccttctttttaggttcaagaccagcccatttttcctctagaatgagaacagatcattgctcttctgttgagcacagagttgttggtttgtacttaagggcaatcctgttagaatcactcctgagtggctaaatatcttcagtctgagagacttgtccagcaggttatgggaacagcagattcatgtcacctgtctcttgctcacttaggcaaacgcttagtgtctggaatggtgggtagaacccttgtatttactaccaaaattgagctttctctgacatttttgctcaatgtatgttagatttgtgtaagttaaattagatgttggcttatgcgtggtataagatttaaaatagacttcttagcaaaaagaacacctggtatcagattgacttaccccttcattttgtttgcttttattcagtgaagtgttgaaataacaggtatctcatgtctcatctttgaattataatgaattttgtatcatagctttagtttctggtacttttttttttttttttttgagacaagtctcgctctgtcacccaggctgaagagcagtggcgcgatctcagcttaacgcatcctctgcctcctaggttcaagcgattctcctgcctcagactcccaaatagctgagatcacaggcacctgccaccatacccggctaatttttgtatttttagtagagatggggttttaccgtgttggccaggctgatctccaactcctgacctcaggtgattcgcccgccttggcctcccaaagtgctaggattacaggcgtgagccacttggccccagcctctgatacctatttttttccgtttttcctccaacagtgtttctgtaaactgagtatatactcgatgaaatgagaagatttaacttataaaatcgatttagtatagttttcaagaaaaacttaaactttttttttctttttttccttttttttttttttttgagacagtctcactgtgattgcccaggctggagtgcagtggcacaatcttggctcactgcagccttggcctcctgggctcaggtgattggttctcccacctcagcctccagagtatcttggactataggcacatgccatcacgcctggctaatttgtatttttagtagagacagggtttcaccatattgtccaggctggtctcaaactcctggactcaggcaatctgcctgccttagcctcccaaagtgctgggattacaggtgtgagccatggcccccagctgaaaactttaacctttagatgtcaattcagttagtgagtctgttttatctgttgttcaagcaaattctttaaaacacttaaaatagttcagttcttcagttggttgaaatttatatggccatttcttttctaagcagtactctcagataaacaccagaatgctggtctatggacttcagtttgaaatcaatagtttactgtcttgctggaaggaggaaagtgatcttactgttgtggaaaatatatcactgcagaatctactcacttttgctgcaacggtcaagttaatgttttctatcattcagctaagattgctaaattagtataactttcctttgcctttgaactttttagcactacagaaaccaggactacaaatatgttctttacttttttctgttattttcccctatcatgagacttcttgaaggcgaatgctgttcattatgctttctcatctgtactttcatgtacatgtaatccactgtagtgaaggcactaaaacctgttgtattttccacatttcgatagatctctcacaggatttaacacttttggaatgctcagtaaattattattgactgcttgataatacctctttgttcctgcctttccccaagtccttcaacagaagtttcttctagcactttgcaggtcagttgagtggactatttgagtccctcacagtaatgagcttgtgtgtttttgtcattcttttttctttttttgaaaaaacaatagagtcatttaaggaagcaaaaaggtccctgggtcaagatttttattttatcttttatggtggtagggtgaggtgtgagtatttagggagatggttggtaggatggcgttgtcttagggttgcaggaggatcagaagggtgactgtaactactgatgatatcttacagtggtgaaggagaagataagtgaaaacagaggcaatttgtttaaacgaattttagtagatattagtctcttaatttggcactgacatatgacagattatttcatttaaattctgtagtttgacaggtataataaagtacccttcattaaatattcttcacatatactcttgtttgcctttttctagttgcaagagtggtgatttctatgtttcattataaattttagaaatatataatttgaatatattgtctgttctaggttctctgtgagtcaagaaaaggcagggtattatgacttcggattcgtatgatgtctggatatatttaaggggagcagttctcaaagtgtggcctgggattatgggatcaaaactattttttctttctttctttcttttttttttttttttgagacagggtctcactctgtcatccaggctggagtgcagtggcgacatcttggcccactgcaacctctgcctcccaggttcaagtgattcttgtgtctcaacctcccagaaactattttcataataatactgagttgttccttgcttttttttaaaaaaacaaaacaaaacaaaaacaaacaaaaaaaccatgttggacatttgtacccacggtgcaaaagcaatgaataaacactgttggcaccttagcacttgcagttaaaaaagccagttttgtttgagaatgtccttgatgaagtactaaaaatgattaattttattaaatcttgatccttgcgtgcatgcagttgtaacattctgtgcaacaagatgggaatgtgtgtaaagtgcttctgctgcatattgaggtatgttgggttttgagcaaaagcacttacgtgattaagttgtgagctccactagccacttttttcatggaaatttcatttttacttaaaagagggtctgacaaaccatgattattcagacttaggtatttggcagactttttttaaatcaatgaagtgagactgtcacttcaaggaaaacaactgaccatatttgttggcagagagaacatttgggctttcaagcaaaaattaaaatttttggaaaacttttgtctgttactgtgagcatgacagcttcccagtacttaaagactttctgatgagattaatgggtttaacaacatgattttttgaaatatgccaacttctggaaaatctgcgtaactcagtggaccagtactttttagatgaggaatgatgatttataacattgtgcctgagttaaagattcatttaaagtgaatagactaatgaatgttaatgtggcagagtaggaaaagttcactgatacaatttcggattccatgttgcatctaatcttgtaagaaagaaattaccactgctaactgaagtatggtggttattttgaggaaaagcacctgtgagattgagttgtgaactgaactagccactttttaatagaactgttttggtgtaatatcaaagcacgagatccacaatgacctcagaaggctattcaaacactctcccttttctaagctaagtatgtttgagactggattttcttcatatacttgaaccaaaacaacatattggaacagattgaatgcagaaacagttacgagaatccgtttcctattagacagatattaaagaaattggcaaaaatgtaaagcaccacttactaattaattttttttttttttttttaaataaaagaaggctatgttgctcaggctggtctgaaactcctgggctcaagtggtcctcctgcctcagccccgcaaagtgctaggattataggcatgagcaaccacgcttgccctcactcactaattttttttaaaggaaaataagtttctttttaaaaatgtgttatttatattaggtacagttggccctccatattttcaggttcagcttctgtgcattcaacaactgcagatcaaaaatacttgtggaaaaaagccaataaaataatagaacagggcgggcgctgtggctcatgcctgtaatcccagcactttgggaggccaatccgggtggatcacctgaggtcaggagttcgagaccagcctggccaacatggtgaaaccctgtctctactaaaaatacaaaaattagctgggcatggtagtgtgtgcctgtaatcccagctactcaggaggctgagacaggagaatcgcttgaaccctggaggcggaggttgcagtgagccaagattgcgccactgcactccagcctgggtgacagagtgagactctgtctccaaaaaaaaaaaaaaagatacaaataatacagtataacaaggatttatataacattttacattgtattagatgatcataagtaatctagagccagatgatttaaagtataaaggagaatgtgcataggttatatgcaaatactgtgccattttatataagagatgagcatctgtggattttggtatccatgaagttcctggaaccaataccccctagacccccatggatactgagggcttgctataacagtttttaataaaaataaaaaacaggccaggtgtagtggctcacacctgtaatcccagcactttgggaggccaaggtgaggtgattgtttgagcccaggaattcaagaccagcctgggcaacatggcgaaaccctgtctctgctaaaaatagaaaacaatagccagacatggtagtgtgcacatgtggtcccagctacctgggaagttgagatgagaggatcacctaagcccaggagggcgaggctgtagtgagccgtgattgcgccagtgcacttcagccagggccagagtgagaccttgtctcaaaaaaataaaataaaataaaagtaaattgtaaaaaactctttagtttttcatttctattatgttaaatgttaatagctataacacatataaactaaacaggtcatgagaccaaaatgctgaagaatggtgttaatggtgttcttacttactttgaattaccgtttttatttttctatgctagctaattactatgtgaataattaacctcaatgaagttctgtattctctgttgtagcagtggctgatttagggctcagttgtcttttgacctgttcttccttctcatatgattgcatctcgatttttaattttagacttagtttttaattctaaaattaaaaatctttttttttttttcttctatgcccactgctgtcaacccagtcagggcccttatcactttattcttgaattacttcagttctccattttttttctcatgtggtgtttttcaaacttgagtgttgattggaatcccagggttaattcaactttaattttatgaatatgatttcatataagttccttatgataaaaccagagcagatttacaaattaaatatagaccatcaaattagctgtacatatttaaggatgagattttgttaaaaccaaatagtcaatgttagagcttatagaatggcatagcctcaggatcagctttataatcagtttttttaaatttggcttgataatactaacagagaatggctatttgcataaatatgttttataaaatggtgttaacttttagtctttgttcaggataatgagacctactagttaaccagaacggggccagcaagcaactcttgaatgctagttttaatgcctgatcaaaattctgtaaagctgtgttgatcactgaggcgttgcggatatactgagcctgcattaagtggatatttaatctaattatttctggaatctttaccagaaaacatgctcttacatagtttgctcctgggtttgctgttggtgaactgccgttggttggtgggatctctgtgtcccatgggctttgccacacagctggggctctgagtacttcagctcacattcctttgtttgccacccttgccttaactcacttacctgtattgttttttctcccatagcactcaacatcatcttacatgtaaacattttactttgttgttgttgttgttgttgttgttgttgtttttgagacagagtcttgctctgttgcccaggctggtgcagtggcacatcttggctcactgaaatccctgcttcctgggctcaagtgattctcatgcctcagcctccttagtagccgggactacaggtgtgtgccaccactcctggctaatttttgtatttttagtagagacggggtttcaccgtcttggccaggctggtcttgaactcctggcctcaggtcatccacctgcttcagcctcccaaagtgctgggatcacaggcatgagctactgcacctgacactttgtttttaactgtttctgtccaactagattttaagctgtataagggcacagatttttaattgttaattgctaagtcttcagtttctattgtagtctctggcttgtattagatgctcaataaatatttgttgacttaatgaatgcatattaacccttcttttctttattcaactgcaaactcaaatactcttttctgagttgtgtgctctcactgtgggtaaagaccagtttttctcttcattttaaacacaactaaactggccctgaattgtatagaatccttttgatttgttgtttgatcagtacaagttcagtcagtggcacagttacttcccttgattcagattctgtagaagcctaaaagtgcattatctcttcaagtagacatgtcatcatataggctgctatggagatctttttttttccttttaaattgtttgtgtaacagtttctgttttaaaacagtggaattaccagcctggacactatagtgagacactttctctacaaaaaataaattaaaaaaaattagctgggtgtggtggagtacacctgtagtccccagctactcgagaggctgaggcagaaagattgcctgagcccaggaatttgaggcttcagtgagttgggattgcatcactgcactccagcctggacgacagagtgagaccttgtcccttccaaaaaaattgaaaaagtagaattatatttgggagtttttttcctcaaattcctttgaagttaagatttataaaagtatgggaggccaagctgggattatcatttgggcccagatgttccaggctgcagtgagctacggtcgggccacggaactccagcctggggaacagagtgagccctgcctcaaaataataataaaaataataataatagtacaagctctcttaattactacctgttttttttttgagacagagtcttgctctgtcacccaggctggagtgcagtggcgctatctaggctcattgcaagctctgcctcccgggttcacgccattctcctgcctcagcctcccgagtagctgggactacaggtgcccgccaccacgcctggctaattttttgtatttttagtagagatggggtttcaccttgttagcaagaatggtctcgatctcctgacctcgtgatctgcctgccttggcctcccaaagtgctgggattataggcgtgagccactgcgcctggccactacctgtttttttttttaatcctatgtttttaaataattctaatcatctattcatattttttgtttctcctatttaacattttatgtaacatttttagattttaaaatttgtttctgttatcacttctaaaagtgaatgttatttttaaaaatgaatgcctttacattgggttgttatgtaacctaatttgctttaacaaataactttattttggagtaattttatttttaattatttatttatttatttatttatttgggacggagtctcgctctgtcgcccaggctggaatgcagaggtgcgatctctgctcactgcagcctccacctcctgggttcaagcaattctcctgccttagcctcccaagtagctgggattacaggtgctcgccatcatgcccagctaatttttgtatttttagtagagactgggtttcaccatattggccaggctgctcttgaactcctgacttacgtgatccgcctgcctcagcctcccaaagtgctgggattaacaagcatgagccactgcacctggcctattttggaatacttttggatttatatagccatggtatatttgttaaaactaagaaatcagtatcagtatgttgtcattaactaaactcaagactttatttggattttgccagttattccactaatgtctttctttggttggttggttggttggtttcaggatccaatccaagataccacagttcatttagttatcatgtctcctaagtttttctgatctgtggttgttctcagcatttccttatttttcatgacctcttaatcgttttaaagtgtattggtcagatgttttgtaagaatgtcctttgatttcggcttatcggatgttttcttatgattaggctgaagttatgggttgaggtctgggggaaggataccacagaggtgaaatccccatctcatttcatcacatcggggagtacataatgacagcagtacttaccattgctcatgttaatggttatggttttttttcacagaaacattactgtttccctttccagactcttctttggaagtgaatcattgaatctagctcacgctcagggggaaggaaattgaattctccctcccagaatggggacatacactcatgtatcagttggaattcttgtcaggagagttgttccttctcctccagttgtttatttaatcacttatttatatcatagactcatgaataattattttattctgttataatactgttatgatttactctgctgctcaaattattccagctttggccactgagagtttcttctgtttgcttccagtctcggacctatccgtctcctttcatctttggagcatttcccttcttctactggcttgccttgtagtttccctgtcccaaccctagaatcagctgtttctgcagaccctgcttccttgtatttattggaaggtggtatttagaaacaaaagtcttgggtgcagggtatgcttattttattgctcctggggtgtcactgcttccaggccctctgttggacagaccctggaaatgcaggtatttcagctaacctgcatgtgcatacatacctacgtttctgtatctatccgcatatattttaaaatacacgtgagttcatattgatatatctgactaattcatcaccacctcttgcttatttgtaacttctttctgtgacattgagaaacttggcacacattatctacattttatttacttatttgtttaaccctagtgtacatgtagagtattttcagaattacagactggtacccttatgagaaacaaatttaccagctagagtacagagtagattgtccaaagttctgtagattagctccccccgacctcctgctccttccatgagattatctcataaaattataatactgttagacttgctgtatagtttgcattctatcctgagatcccctgacatcctgttttgtttttatttgcatacagtttaccatttaaaaaaagtctttatattgagttgttaactttttaatataaatgttgtaattcctgatattactcatctgccatttatgtagttgatagtcactacttttttttttttttttttttttttgagatggagtcttgctctgtcgcctaggctggagtgcagtgacgtgttctcagctcactgcaacctccgcctcctaggttcaagcgattctcctgcctcagcctcctgagtagctgggattacaggcgtgcatcaccacgcccggataatttttgtatttttagtagagacggggtttcaccatgttgggcaggctggtcttgaactcttgacctcatgatccacctgcctcggtctcccaaagtgctgggattacaggcgggagccacagcgcccacctgatagccactacttttttaatgctgatatagtgcttaccatctgtcaggcactgtctatgcaccgtaaataaatttacttctcacaatgactctgaggtggaggctcttgaattagccttttttcatgaggagagtgaggcacaaagatgtgcagtaacttggccaacttcacacccagctgctaagtgggagaacttggatctgaacccagggaatgagctttggagtccaaactcttgctttttgtttaatgctgtgtataggacttagaattaatacaactaactcttctcttattagtttagtttattacttggaatttggtgtgaaatagagagtgctgctaccccaattctttgccccatgtgtgtaacaggcattattaatcatgacagcactctctctgctgagctagaacatggcctggcctaaggccaataatccttatggacacaaccctcaaagtggttgtatgagatgaactctccttgccatctctgatcttgtctgttttgaatcctgattctagtgcccagtgcatggcactgcgtgcctgcttctcctggattcctctctcatggtcttcctttttacagggacaggttttctatattccccctcaggcataggatctgtttctcttaagtaattaatttttatcacttaccaataatttaacatctatatgtctaagttctctttatattgtttttcttatccttacctacaaaatctcatttaccattgatttaaatttcagtatattgaaacaatggattgtaacattaaaaataaatgaaattgccaaatgatactaacagctgccttcaaagcatttaaacatacaaacaggcactattgaagactggagagttatcaaaattggcaattttttggcagtcttgctgtgaagtaaacatttttaaaaggaaggacattgagaatattgtaatcatattacttacatcttgttgggtttggatttgaccttacatagcctggtattcagttaagagtcaaagttgctgctattaatttagttgagaaggataaatagtacatgtagtttattgttttctttagagaaatagaaacagaaacatttatttggccagaccaaataggtggtcattcccttgatttagcaaatccttgaggtagaattttttttttttttttttgagacggagtctcactgtgtcgcccaggctggaatgcagtggcacgatctcggctcactgcaagctctgcctcccgggttcacgccattctcctgcctcagcatcccgagtagctgggactacaggtgcccgccaccacgcctggctaattttttgtatttttagtagagacggggtttcactgtgttagtctcgatctcctgacctcatgatctgcccatcttggcctcccaaagtgctgggattattggcgtgagccaccgcgcctcccggtagaatttttaaagaagcaataagggctctgacaatacctatgggacttttttcaaattattcagttattggcagctgggtaaagagggacaggaatgtctgatttaggtaaatacctctcacaagtggagtaggggcgtatctggtagagaacagtgctgattccttggacttgtgtggcctggccacctgagaggtaggtaggaaggtgtgtcttggccatgtcctggggcctctgtaaacctgagaggatggaggaagctctactttttctgacgatgctgttggtgataatgaagtaggctatgagagcccatcttccattaattcagatgttcctatacagttggccctctgtaaatgggattctacatttgtagattcagccaactgtgggtaaaaatacttgaaaagaaacaaaagtgtgtgtactgaacatgtacatacttttttcttgccattattccctaaacataatagtttaacaactatttatgtaatatttacattgtattaggtatttagtaatctagagatggttttaaagcaggggtccctagtccccaggccgtggactggtacccgtctgtggcccgttaggaactgggctgtacagcaggaggtgagctccgcctcctgtcagattggcagcagcattagattctcacggaagcgtgaaccctattgtaagctgcacacgtgagggatctaggttgcacactccttaaaagaatcttttttttttggagacggagtctcgtctcactgtgttgcctaggctggagtgcagtggcatgatcctggctcacctcaacctctgcctcccaggttcaagtgattctcctgcctcagcttcctgagtagctgggattacaggcacctgcctccacacccagctaatttttgtatttttagtagaaacagggttttaccatgttggccagactggtctcgaattcctgacctcaagtgatctgcctgccttggcctcccaaagtgctgggatatgagccaccatgcctggccatccttatgagaatctaactaatgcctgatgatctgaggtggaacagtttcatcctgaaaccatgtaccctctcccctctttgtggaaaaactgtcttccacaaaaccagtccctggtgcaaaaaagttggagactgctggtttaaagtatatgggagaatgtgtatacgttatgtaatagtgtaccattttatatcagggacttgagtcttcgtggattttggtatctgttgggggtcctggaactaatcctccgtggatatggaggaacaactgtatatatggtctcagtaataaatacgtatctgagataccctctgtattaagaaaaaaaagatgggaatttcttggctcatataactgaatagttccgaaatttgggaaggtctgcctgacttagggcttaggtcatgagactacagttctttcttggctttgacttttgttttttgtagttgttgactctgttctttgaggctcttctccaagatggcttccaacaagtccttgggcaaacatttttccaggtttagacctaaggggagaagagtgagcattcttgtcctagcattgcaggaaacctgagattttcactgtgactgcactgattgtggccgtgtatctaaccctgtactggtcactatgtctagggagatgtaccttggtcaggccagggtcacaagcagcttgagtcagcttcctccagtgtacttggtagttctcagagaagagttggtgtgaagttcccaagagaagggtgaattgaccctgggtggcaaaaacaacatagcatctactctagtgggataaagtaagatggtaaggcatggtgttcagggtatttctgagtttggtttgattcacaaaatagattgtgaacactgtaattgcccttaattttagttaacctatgtaaatgtaaatctgtgaggtgtcactacattctgctaaagctttgatgggctcctgccatattctggtttggcttttgtattaaagagccattgttgttttggtttcactgtatacaggtagacttttgttttaatgaatagaggtataatctgttttgaacaggaaaagctgcttttgtattctggataaagttcatactagtgggatttcacctatgaaactaaacaaatctttgaaaaatttaaaaaccatatgtatttacacagtgtccattcagtagaagtcgtttaaataaaggcttctgccaatatatgaatatttagagctgtattttattattttactttttttgagacagggtctcgctctgtcacctaggctggagtgcagtggtgtgaagacagttcactgcagtctccacctcacaggctcaagagatcctcccacctcagcttcctgagtagttgggaccacaggtgtgcgccactacacctggcttgcttgcttgcttatttattgatttgagatgggagtctcactatattgcctaggctggtcttgaactcctgggctcaatcctccaaccttggcctcccaaaatgctgggtttacaggcttgaaccactgtacgtggccttgaatctgtgttttaatactatgcttacttggctgtggtgttgtgaaaagatcactgaaaatggagtcagaggcctgatttgagccagtcgtttgttgtgggggaaggaggtcaggggagctaacatctaaaggctcactatatgccaggcacagaaccaagtgtgtttgcatgtatatttcgtttttgttgccagactttgaggtaggttttatggataaggtctttaaggcaatatcagcttccttttaaaaaagaaattccggaaactgagttttaggctgaagatctctaactggtagtagggacaactgaaccacagggtcctaactgaccctgcgatttatctccttttgcggggggtttcttgataatagggtgcactttacctcattttttggctcaagcatggataggccacccttccttttcatacctatagctaagctttacaaatgatatgctgataagatacaagctactcgttattcatgtgggttaatagacctgtttgtttgcttgtttttaagtctatagccgccccacccccaatctacaatttcaccttctaaggttttagttactcattcaaactgcagtctgaaaatgttacgatattttgagagagagaagactctagctacgtaacttttgtaacaatatattgttataattgttcattttaccattagttattgctgtcagtctcttactgtgccttatttataaattaaacttcatgggtatgtacgtataggaaaaaacatggtatatttagagtttagtactatctgcagctttaggcatccgctgtggggttggcggggggcggtcttgggagataagtggggactactgtacaattatcaggcacacacaggctctgggattttacaaatgagtaaaagtggttcttgctgttgaagcacttacagtgggaatagagtgaaatacatgaaaatgtgattttaatatgttataaatgctatgatggtgggagtttgttttgtgtaaaacatccttttaattggtactttaaattttaatattctttcacaggtctacctatttagtcttacactttcaaagaactacctggatgctgtagattttcatgatatactttattaggtatgttattaatggtagaaacagcatggaaagtcttccagaatattagacaaggacagttctagtactaaaacataaaatgctaactaatgtcttcatcaagacataaaatatgtatcttaaaaaataaattgtaagccaggcgcagtggctcacacctgtaatcccagcactttgggaggctgaggcgggtggatcacaaggtcaggagattgagaccatcctggctaacacggtgaaaccctgtctctactaaaaatacaaaaaattagcctggcgtggtggcgggcaccggtagtcccacctacttgggaggctgaggcaggagaatggcgtgaacccgggaggcagagcttgcagtgagcggagattgcaccaccgcactccagcttgggggacagagtgagactccatctcaaaaaaaaagaaattgtaataacacccacattatacatcagtgaaaactaaacacgttactaccctaggccttattgcacaggggtgctacctccaaggagaaatttgtctaggcagcagatggactagaggtgattagcctatgagcgaatgaggctacagatcattcctttttatctgattccttttctttctagttcctaggccttggaagcactaagtggtcttaagtaatttgcatagaattagttgagttcatctgttaactaactagcagataggaagaaaactattgtcatgaaattatttaaaaaataataatgctccagtttcttctcatctttgatgtcctttggtcctacctcactgccttcctaacaccattttctgctttacctcaaagctggggtcatcttgagtttagcctgcttaatccgagtgactgtcagctttattccactttagcaactcgcaggcaaggccacacttggaaacttttcacttggaatagttctatcttggtgatttcatcagccttctttatgtcaaatacactcaaattcctgcccattcttatctcttcgttcccttcaggtccttagtccttttaatttgtgactttcattctccaggtccattcttattaaatgtctgccagccagactttagttgccccctgtccagctttctcttgctcagacctaagatttctttaggttctttctttgccttttgaaatccagctcagcttttaagattgagttccttgttacctttcctgccatccttctgcagttcctaatattcttttctttctcccaaagtgcttttgtataaacagtcagccttccatatccgtgagttccaaatccatggatcctgaattcatggatttaaccagctgcagataaaaaatattcagaaaaaaaaagatggttgcatctgtactgaacatgtctgtactgttttgcttgtcattattttctaaacaatacagtataacaactatttacatggcatttacattgtattagggattataagtaatctagaggtgatttaaagtatatgggagtctcttatatcccaggaagccaggtaaaaaaaaaaagtatatgggaggctatgcataggtgatatgcaaatattacaccactttatatcacggacttttgagcatctgtggattttggtatccgaggggtgtcctggaaccagttccccagggatactgaagtatgtctgtctatctcatactatatttttccctttgtcttaggtagactatcagctccataggggcaaggatttaataatatttgtatattcattttattcaagttcgtatacactgcttgggtcataatatttattacatgcttgagaaaatgaatttcttcgcccctttgttacagctctgagtaaacagccatctgccttctctgtcatctgttggtggttgagtatttctgtagaaagttacccattggcctcaggactcttactctaaatcttcttcttaggcagttttctctgtgcatgaagtttttatgtaaacaaatagatgaagcctgccctactcatttatttgctcaagccagaaagtcaccttcttcttcactttccatatttaaatcatcatttggtggaattttggcctaagcaactcttgaattcacgtacttttccctgtcatcgccagtgtggtgtagaagcctctgtcaccccttgtcgggatgctgtgctgcagcatcatctaacctggttgcagttattctttcactccctcaccgcacacccttttacttaaaacactaaaagtggcttctcattgttcttaagataaagcacaaattgttagtgtggcctgtaaagctttgcatagcctgacagagaatgtcctgctaataatttgaaggtacaggatgattttaatactttaggagaaaatgttctaggaaaagacgcttgtttagacttaaggtgaggactctgcagtatgaattagacatctggtgaactataagctgtccccgcatttaaacataattggttctgagagcctgcaactaaagataaggcagaagaatttactttgcatttcctgcattcctcttttcgcttgatagcagaaacccctcatgttaataaaggtggcacaagaggcaaaaatacagactttatcacagtgtttaaggagaggtgcatgattaagtgtgtggggagagagtacctttgtacattttattatatggtgaactgtatgttttctacttttagtactgtttgtaaattttacttcttcttggatttacctttttcagttatattattccattatgccttgctactgtaacagctaatgatgaaaaacaggatctgtctttatattttcttccctccacaaatgtggatctcatagagttgaaaactaggttgtgatatagtatagtatacctaattcctgtaatgggatcatgttcctataatatggccgcaatttagtgtagaatttttgtaaataaaagtgtattttaagtttaacttaaactttcaatgaagtgttttaaggatttaaccatgcagcacaaatgagcacctttctgtaaatgccaacagtgtaatatgtgtcatttcttcactgattgttagtttgctgcggattaaaacacaggtgatcatattcaggctggttagattagtgattttaatatgaaaccattgcttttagaataatcatgggccagactgggaagaaatctgagaagggaccagtttgttggcggaagcgtgtaaaatcagagtacatgcgactgagacagctcaagaggttcagacgagctgatgaagtaaaggtataattttatcttttgtgaaaatgaatatacaattaaggataggttttttcccctcctaagttcaataagtttttatttaaaataattctagccaagtttgtatttacaataagatgagtgaatacttggaagcttaggttcttgatctgtcttaacattataccatgcacattaatcagtctttgtttagtatacttttatttgcatatgcagctgcagaaatgcctccctaaatataaagggatgcatttcatgattttatgtttctaaagtcattgtgattaaaaaaaaaaatacacacacacacacacacacacacacacacacacacacacacacagtcaacaaagaaaggatggcaatcgtttcctgttctctaaccacttgcaataaaataacagatgtggtgtttttgtattatttgaatgtgggaaactatagtgtaaaatctatatgcacctaagaaaatgttcttgatatttttgaggatacactagatttttaacctgctttacaggtgttatacattttctaacaatgaacaatttctcctttcctctccttcatttttttttttaagagtatgtttagttccaatcgtcagaaaattttggaaagaacggaaatcttaaaccaagaatggaaacagcgaaggatacagcctgtgcacatcctgacttctgtgagctcattgcgcgggactagggaggttggttaacataacatgttgtagtaattatcatcatcttttggtttatgctattggaacatttgtttggttattgggaggaaatcattgacctcagggtgtccatctttttattgctatttctttttaatgtgcaactgttaatgactgctgtagatcacactattagctattcctataacagagttctaagtgtttggaatatactttgaactaggtagatgcctagattttataagaatgttgatttaaaaaaaaaagcttttaaatcaaatactctttaatgtcctcatcagatcactatttagagcaaggttttctgactcactgttgtaaccccaatttgaattagccatgtggtaagaaatgttttaatattcatggacaagaaagctttttattatatattttgttcaaaggctaagcctctctataagaatttttaaatttcttgttgagagattggaatttctttttctatagtactttctgaacgagctagctcttaattactccaagagtttcctattttcaaagaaaggcagtaaatctatggtagaatctataattaaatatcccgttaaaacatgattgcagcaagatgagaagaaaatggcaaaagtctaaatagcttaggcatttctgtttttaagtgcctgtgttgtatagaaagacatggcataggatatttaaaggggagttgaagcaaaaggggaaagagcgagttggaattaaaattgcactatgtagtagattgtttatctgaatgtctaaatatgggaagcacctaaacaatggaatttgttttaagataatttttcaacgagtagccatttttaatataacattattgtaacaagcaacaatttgctattgtatgaggccttctggagattgtgtgacatatgagcttcaaagacttgtcagtgatatcccagtagcaacagacataatcctaatgcagattttagtgatattctggtggtcttgatggtgacacttggaatgattcttagtcatttatgcgttttgttaggtgacacctctgtaaagctctgacttataattgtataaatattgattatacagtgacactttcctcctcatctggtacaggccagagcctagatgttagaggtcagtggcatgggggaaagggattctttttgatgcccatcagaacgttcttaaagggaataaggatggggcttttaagtaattgctttgaaagtttttatttggtgaccttttagaaatgttgaattgaaagaaaaacctcattttctctctggaggaataaatcttagaaatttggagaaattaggtagattcacatggaaaacttatttttgccacccattatgaatctcagaatgctatcaaaagcctaacttaggtttataataaaagtcaacagcaataatgaattgtgtcactgtgctaggtactttgtacacattacctcttttaatcttcatgataaggaaggagtattacacttttttttttttaatccaggcaaggaaactgagccttagaagcatttagtcagtttgcctgctctaatgatctgatgtgggcccagaagagcacactttgctcagacacatgaagtattagtgaagtacattattgacatacaacttgaattgctcatagtatatttggcattaaatttaagagtattgtttgttcaagtggatatttactaattgaaattttcttttaattttgtcaaatggagacaaatcgttgaatataaagatacctaatgttcgtgagtttatgtgaaaaattgggagaagaaatcagcattttaataaaacaaaattgttttctaaagttagtacttccacagtaccacacacacacgcagattgagaataaacattttcacagagtatgggggaaaaggaggaaaataatccccagccttaggaatccagtttttgttgcatagaactctgacctgattaaggtcagtcattttttttgttgctggtgttggtagctgatcctgcttcagatgatccatctattatttcccctttccgcctttttaaaccatcaccactgacttttagaagccagagtttatatcgtttgtgataagcttcttggtgttatcacaataaatcgtaaagctttagggctaaaaaggactgtagtggtctcatggtccaacctcctgacttttcagatgagaatatatccctgtttattttttctttcgtttaagcatttccatctacatattatttcttttatatatttgaaagattctagtctgaagtaggtcaggtagggaggagaaaataaaagtgattcttgtttggcaaagactttcctagtggtaggcttggcagaatttcagactgcagtattgattcaaacacgtaaagtctatagcattcaacatttgaagtgccattatagcattgttttaattaactgcttgcttttataagctaattatatgtaagtgctggtgtcttcaatttaaatcctctgcagcatgacaaatcaatgacaatttttagttcttttgtcaggtcttaaacttatactcccatttggccgggcgcggtggctcacgcctgtaatcccagcactttgggaggccgaggcgggcggatcacgaggtcaggagatcgagaccatcctggctaacaaggtgaaaccccgtctctactaaaaatacaaaaaattagccgggcgtggtagcgggcgcctgtagtcccagctactggggaggctgaggcaggagaatggcgtgaacctgggaggcggagcttgcagtgagccgagatcgcgccactgcactccagcctgggcgacagagcgagacgctgtctcaaaaaaaaaaaaaaaaaaaaaaaaaaaaaacttatactcccatttgtagttgtagaagtggatatactcagtttgaaaatgactgattttctccaagttattttggtaaagaatgtcggacaaaagtttactgaagtgagtgctttagatgctgacttcaggtcagggagctctgcatttgaacccaaagaccacatctccagtatgtggttttcttactgtgtgtggttttgttttgtttttgtgacagggtcttgctctgttgcctaggctggagtgcagtggtacaatcacagcagccttgacctcccaggctcaggcgatcctctcacctcagcctcctgagtagctaggactacagtcacacgccaccacatcgggctaattttttttttttttttttttgagacggagtttcgttcttgttgcccaggctggagtgcaatggtgcagtctcggctcactgcaacctctgcctcccaggttcaagcgattatcctgcctcagcctcctgagtagctgggattacaggcatatgccaccacgcccggctagtttttgtatttttagtagagatggggtttcatcattttggtcaggctggtctcgaactcctgacctcaggtgatccacccaccttggcctcccaaagtgctgggattacaagtgtgagccaccgagcacatcgggctaatttttttgtattattttgtagagacagggtcataccatgttttccaggctggtctcgaactcctgggctcaagcaatccatctgccttggcctcccaaagtactgggattacaggtgtgagtcaccatacccgtcccttaatgtgtttttaagatactttagggcaactcttttttttttgtttttgagattatagaacctaagcattattgttcatagaattttaatacagaatgtgtttacttttaaaaaacacttctgactttttgaagacagtgactatatctgttttacgtttatttcttttattcttaagttaatcttttaaagaagcatccagcttcacactgtcattaatcaatacatataggtcaagggatgtacattttattcccataatatgtcactgttagtcaagaaattgttactaggtgactttcataactttgtcttgtcaaccagtaataactatgttctgtaggtcttcatattggtagttatattcttcattgtgtctctttttccatttttaatgaagaaactggtttaagagttactcttgaggttctcattaatgtatttctttttcgtacatctgcccatttcttgctgataatcacaagacacttctccttcactgacttcatatcaaaatgttttctactgtatgtgttatgactgaaagagaagtttgcttagatagtgcctgtcttctgggcaaatggtatgattagtttagtaatttaatccatcttgccaatatacatttctagattcccaggagaatataatgttcttgtaagagttttgtatcttgtttactaatgaaaagagagaatatggtgtatattcttggggcttcagaatgtctaatagaagcagcatcagaaggggatcacggtcctcgtatgaagaatttaaaaacttttggacttttaaatatttacagatttgctcttcatagtaatatttgaaatgattttaagttcattgcttagcatttgatattagcagatttttttggggggagaagcttctatcaaaataatgtgtaaattattttgtatgttggcagtttggacttaacatttttgttgaaggagaagaaaaatacctgttacatgtaaacactcgattgcattttttattgatttagtaatgaagttccttcagttaattgtaaatgaaaatttagtcactgtttacaaagaaaaaataatatcctagtgtatttcatgtataatttagtgtactttactcagatacattctttgagtgtagtaacatggtttctttatacattgcaggattataggccctataggtttagattctcatgaaccttttgagcaaatatggcagaaagctggtcacttttctcatgtctttaaattaagtggatggctcttcaagtgtctgtcttactcttagtctgaacatatacactcattcttattgcctcaaggaagtggtctctgagttgctttctgtagctccttgcctcttttaactattattggtatttacttggagagttgagtcttgttaggttaactgtcagtcattcccacctgtataacttgtaaatccatgcagcctttgctttctttctggctttatttaggctgaaatagatgtaacatttcttaaatgatcatataaggattttttttttcttgtgagcagaaactaatataagcattttatgcttttccaaagggttagcttaaaaaaaaaaggtcatttgtgatatttgagttcatatagcatcatatattaaatacatgtcatttattatgtttatattttaaatttgattatatatcttcagtttaaaaggtgaattttaaaaagtcaaatttaggcaactaataaaactagcagaagttgcttttcatttgtagtttttctcctagaatattgtatatatagtttgtgttttataaattattgttataaagatcatgtatcttccccaaatgcaaaaccgagttctgacaactatttaaaaataaaacaacaaatccaaacaaacaaaagtgcttggttaatctggaatgttagaaattgttttattctctgaagaaacaagaaaattgcattagaccgaggacttttgccataatttagctttataatagggattgacttaaatttactccttaggattctgtcttaccttctcttagcagattttataaaagaatatcacttgagtaacattttggaaaggctgggcagatttcataagctacccaacaaggcagttttatactagctaatgtgactacctgttgggctaatgaaactagtttaaaagttttatctttttctctccactgaacagatcattgtaaaatgattattgtaaaaatttagataacacagaaataggtaaaacagaaagcaaaagtccctgtagtccaactgctctggcttttattctttcagatttcattttctatatatactaggaggttaataatattttatttttaaaaattattggccagatatacatcctttccattttgggccatcactttacaacctctgtccaaattttcattcttttaaaaaatatgtagtgtttgacattatggatataccataatttattgccccattcttgatggacatttagatttttaatttttacttttgcaatcagtgctgtactgaactttatatacatccttgcatcttttgagtaattctgtagaagttcctacaaatagaattattagatcaagatgatatgcatgtttaaaaatttagcagatattaccaaatgcaccctcaaaagttttacattacacccccaccagctgtttatggaatgtctgtttacctatattctcaacacaatattatcaatcttaatcttcagtccaataggtaaaacattgttagaattggttataccgtgtcttaattattcagtgaagttaaatgtcagttactgtttgtttatatttgtgaattggctgttacagtgttggatcttgtgcaattaggttgggcttttcttatgattcataaggactttttgtatattacaaatactagttttggctgggtgcagtggctcacgcctgtaatcccagcactttgggaggccaaggtgggcagaccttttgagatcaggaattctagaccaccctgaccaacatggtgaaagcccatctttactaaaaatacaaaaaaattagctgggcatggtggtgtgcgcctgtagtcccagctacttgggaggctgaggcaggagaatgccttgaacccaggaggcagaggtttcagtgagccgagatcacaagactcaatctcaaaaaaacaaaaaacaaaaaaaaatagttttttttgtcatatgttttgcagattgccccccccccattttgatgttatttctgatatatcttggttatacagttttttcttttaatttttgtctttcttaaaggttccaaaagtctttcttcacttcaagattataaattatctacctatctttcctttagttctctgttttcatttttatattctaatatcatttaacccatcaggaatttcctttggtgtaaagaatgggtaggggatttggtttttaattttgttctttttagtttcctggttgtttcaacactatttactgagtaattaatgaatagtgaggggcagttgtaaacttgtttttgaagatcagcagaatcagccttcttggttggtggtttcctgggcagttctaccactcgagcaagacctgaagtgtttcccttcagaaaccacagcctgtgccatcttgctcactcactttccttccttccttccttccttccttccttccttccttccttccttccttccttatttgacagagttttgctctattacccatgctggagtgcagtggcgtcatcttgtctcacctcaacctctgcctcctgggttcaagctattcttgtgccttggcctccagagcagctgggactacaggcatgcaccaccacacctggctaatttttgtattttagtaaagacagggtttcaccatgttggctaggctggtcttgaactcctgacctcaagtgatccgcccaccttggcctcccaaagtgctgggattacaggcctgagccactgcgcctggtcttgcccactcacttgaacctctactactttgtagtattaaacccagatccactgatttaagcaaggcttcaaaacaattttactgccacagcctatataaactatagatttatataatactctctgttccattttagttgatttttcccccaatgacagaaattgttcttttttctactcacaggactgttattgaattagaaatttgaatttacatgtggtggatgaacatcactcttgttacctgcttcatgtacttttttgagtgcttactacctgtgatgattattctgtttctgatctccagtacttagcaaaactggagtttttccgcaaagctgcagatgagggaatgatttaccttaacagcccttcaggattttaacctaggattaagtaggtttgcatgtttgtgattcctttcattcagggcccggcttctgaaggtaggatgcggggaagagctttaaggatctaaatttcctcccagcctgagcaacatagtgagatcccatctcaataaaaaataaaaaaattagccagatgtggtgacacgtacttgtagtcccagctactcgggaggctgaggtgagataatcatttgagcccaggagtttgaggctgcagtgagccatgattgcaccactgcactctaaccttggcaacaagagctagaccctgtctcaaaaaaaaaaaaaaaaaaaaaaggagtctaaacttcccgatactgtattccaaatgtcctatgttaaatgctgtgttatcattccccgccccttggaatgtagaaaccgttaattacaggataaaagtgaactgagaagcaaatacccttgtgttgtagggtagaggttcttcacccaatgtggaattggtctgtaacaaatactgaacaacacaaactgaaataatttacaatctgatatgaattactctttttcatttcttaactccaacacttgattagttgctttcattaaatacatctgtgtcaatatcttaatggggttttttcttccgtttttgtttctgcctctctcctgttggagcgactcatttcttttcaagtgtcgtcttcaatctcccttctcctattttgccttctcaacctgattatgaattcacttccattattgagcttctctttactttatccaaatttgctatttatctcattgcagtttttcttcagtacttactttgcataaaagtagcctgaacttaaattatatacacggtcattttcaccagaagggctagctaatttaaaacttgggcgtgttatcttttctttcctcaagtcctgcagaatatagggtagtttcagaaatcacccccagcttttctctagacttggtgacagctgatgctttcttctgactcttcctttcctggagtgccgaccttcctgcaccttcctcgctgttgtcacatggaaaggctacaggatgttagacaatgtcaacagtttactatgtctctggcatgaaataaatggaccaaccagtatctgagaatattttttacttggctaattgattgtatgttttcccctactatatggaagttggacttagcctttctcatgttaaagattattcagaggcaggacggccatggctgttgtctttgggatgtccactgtaaaatggggagtcatacctacctcacagggtagttgtgaaatttaaagaagctaactttggtaaagtctctagcacagtgcttggcacatagtagggtgtgttaatttctttcccttccctgcaggccattcacctgctcttccctctacgattttccataacacagtttttacttggaaccagccttctgccaagagtctcagtttggttgtgtactcctacaactactatttttggcttgacttccctctccagctcccagtggtccagccacacagtcgcctattgtaccagctggttgatgtaagtctatccatcctcagaggaacctggttacttaccagtaagctgtgtttctctgaaaatgtagcatccttggtaatgattctagtcccccccatcccctttttttttaaaccattgatgatgaatcatctctaacttccttgtgtgatcctcaagttggaactggaattagagaatctaatttgttgataaaggtctcctagtaagttcctgagtccaggacacatggctctgaccaggtgaaatgtggagacccatgaggtaaaaattcttttcactactctgagtgacatgagacttaattatgtaaactgtcaaggatgatacattttcaaagaaaaataagttgctggtaagtaactgggatttttgagtaatttttctgtaagtcaataaataagaatcccacgtttgttttcaccaacaaatgcttttgcatttgaatatttcataaatgaaaggaatatggttgttagttacggttaatagtaaagaatgggataggtttctagatactagaaatacagtgaggtgggggtagaccatcagttttctaaataggtgctctcttagcttgaaacagaaattgaagtctccattagagaaaatcatcaagtgtagtctgttcattccagaaacattttttgagtgcctactgtttttttgagacactgtgctgagtatcgtttcaagacagaggtgaagccacacttggctcagctgcttttgccctcagagagcttatttcttgtctcttagtgactctcgcatgactcagaactgaggcgatgggatactggggtatgacagaggtatgggactggaagtagtacgtagtgctgcagcctgtgccttaatattttctgtgcttccataagttctttctgttaatgggaaaaatcagctgacttcattcagaatttgcagagtatttgctgtatcactagagcaaccatagatgaagcaaagccaatgctccttctttgtcatagttgaaaactcattctctaacccttatgtgcgactttggagttaggtgttaaagcaggtgaataagtcagtcggagaggcagcccactccccattaagctttcaaagcacttcttccttcagaagccacagaattaatttattcctgccaaatgttaaaaaaatcggaattttttttttttaagaaatgaaaattgttttgtactttaagtcactggatagtatttgatactatcagtatcagtaattatattcagtatattcggtaattataagcacctccacccccaaatttacccagttaagtagaaagaaggaaagaagacttggtagtattaataagttgttgttggaggagatgctcctattacattatgtctctattttctttttttttttttttttgaggcggggtctcccgtcgtcacccaggctggagtgcagtggtgctgatcacaacttactgcagcctttgcctcccaggctcaagtgatcctcccacctcagcccctcaagtagctgggactacaggcacgtgctaccttgctgggctaattttttgtgtgtttttagtagagacagggtttccccatgttgcccaggctggtcttgaacttctgggctcaagcgatctgcccgtcttggcctgccaaagtgctgagattatacgcttgagccactgtgcccagccatgtctctgttttatatagtaaatactgcatggctgtaattgttattttaccccatgagcattgcaagggcaagaactacagtgcagtaattaattaagctcacgggtgttgcagtcagactttaaatccaggttttaatcctggttttgtaatttgctacctttctgactagacaaattgtataacttctctgaacctcagtgtcctcatttgtgaagttttgatgctaaaactacaccataaggttgtaatgaggaataattaagataatatatacaagcacttagcacagtgcctgcaacatagtacgtgctcaataaatgttaactgctgtttttattggattattggatggatggatgaaggattgtatcagaggccaaatagcaggaaggggaaagattgtgggctctggagtgttagtaaactgttcacaccttcttgtttactcgagttaagagccttattagtattattacctttatctttgcctttttggaaagcaaattaatagatgaatcactgtcacagttcttcctaactactccatccttaaacctttacttccactaaggaaggaattatttttgtgctgcagtgactgtgatgattgagagattatcccactggcctgatgcaacccaatgctgagggtcaggtgtggcccatatgccagatttctactctgaatttcaccacaactagttctgctatttttaagacattttaaataaaaaatttaaacatttaatatgtgtgtgtgtgtgtgtgtgtgtgtgtgtgtatatatatatatataatgatttttcagtttcattttactacacttcttttttgctctattttcattgattgtggattatgaatgtatgtctaggatatttttgagaaggctctggaggacttacacctgggcagtagtactctttaaggaatctcggattcgtagacagggtggaaagtgctgtggttatttaggcacagagttataccatatttcagagaatcaaagatgcaaaatttttcacattttaacattggaaacaacatgcatcttagaatcactgtgataagaatggattatacctttgtttagttggcagcattttttcttagtgatacagaagataatgatgtaccttgaaatcgctgtcatcatagattgtatgaaatatggtgtttcaagggactatgtgcactgacacattttagcaatatggtatcatggcaatataaggagcgggaagagcaggggctccagagtcaggcttttggagtttacattctagcccgagaaccatgcgcaactttgggcaagctacttatcctttcttttctatagttttctcacctgtaaaatgggggctaagagtagtacccatcttacagtgttgtaatgaggattaaatagaagacatgtaatgtgtttaaaatagcctagcacatagaaagtacttagtaatcagctaatattattaattcagagattacagttttgcagaatagacttaaatttactttgttgtgattgaaacacaaacccattacccttaatatttatgtatcatctgataatatcagcaattgacacttagattttaaaaaaggaagataaggaagattaactgaacaagttttcttattctttttattttattttattttattttttttttttttgagacggagtttcgctctgtcgcccaggctggagtgcagtggcgcgatctcgactcactgcaagctccgcctcccgggttcacgccattctcctgcctcagcctcccgtgtagctgggactacaggcgcgcgccaccatgcctggctaatttttgtatttttagtagagacggggtttcaccgtgttagccaggatggtctcgatctcctgacctcgtgatccgcccgtctcggcctcccaaagtgctgggattacaggcgtgagccaccgcgcccggcccaagttttcttattcttattaagtaagatttaagtggcttatttggtatacatattactattctgtgtggttggaatgtaagagaaatgaaggatgagctaggaaataaatgtataggaaaagcatggaggagttaatcagatcgctgaatctcatataagtacagtttttgattcttactgatattggtaagtatgggaagggttggaggttttgaaaatttggaaaatttgaagcatttttgcaccctaagtaaaagaaaagagagaatcctatttggtttatatgaccactttactgtcctaggtaaggacttttttttcaaaattaaatatttgggtaggcagcatctctttacaatatgatggctacagcttaaggttgtccttttattcttaagagtcaattttattttttctgttttagtgttcggtgaccagtgacttggattttccaacacaagtcatcccattaaagactctgaatgcagttgcttcagtacccataatgtattcttggtctcccctacagcagaattttatggtatgtaaataagatatcttctgcttatttgataataacttatttgaagtaaaaaagcatagataattttattgtcaaggtgaatcaagacagtataaattctaaaaagctatcaaaataacacttgaagtaatttttaaaaattgattaaggtagtttttttaaggcctgtgcagtattactcttttcctatactctccaaaggaaaagtgttaagcagtaaccatacctaggattaaaaatatttaaaagatgggctgggcattgtggctcatgcctgtaatcccagcactttgggaggctgaggcagatggattacttgagtctgggaattggagatccacctgggcaatatggcaaaacgctgtgtcctcaaaacaaaagttagctgggtgtggcgcatgtctgtagtcccaagctactcaggaggctgaggtggaaggatggcttgagggaggcggaggttgtagtgagctgagattgtgccattgtactctagcttgggtgacagccagaccctgtctgaaaaaaacaaaaggaatgaagcttatagttcttatccttaaaaaagtcagtgtcctgtaatctaagtctgactttgagtttttgttaattgagaacttattatttaaaacaactttaggtagcattttattgtgataatgtacattatggtgtaaaattcatagggcttgtgaaacatgagctgaaacatagttccattgctaactctgacgcagcagcttttgtaataaaatgctaaagagaaactgaagcatgtgttcttgacttgtattgctaaataaaaaatatatagttgtattacttaattgatatataaagtgggaaggctaataaaatgttgatagaagtccttggtgaacctgctttggggaagtttttagtaacttttatactttgtacagtagagtctcaacttcagttactcttctgtagttgtataaatttgagtgtagtttgagaattacattgcatgaccttgagggaagtttcatgttttcacagactgaaattctggaagaatatattatttaaatttgtcattaatttatgaatcacccatggattttgctggtctagcctgggtgacagagccagaccctgtctgattttgctgaccaaagcagattaggcacacaatctttattgtaactaagatacgttttggagagcaggatgatgtggatatgattgaaaagacaaaatatctaagtgtcacttgattttggcttagatagaaagaaatcaacccctagtttaaatgagattagtgcaagtgaaatgagatgaaaacaggcctctagtgtgtacataagcttgaatttgaatatatgaatacattaaaacctgcattttaattatatgctccttttatcccactttttcttttccttgtctgtctacggtacttgttatctttatgaactctccagttgtcctaaatttgttacctagggattatttgagattttttccacattccctggctgctactagtcctgtgtgtggcctttcccagcgtgttcttacctgtgggccatgatcatagtgctgggccgagcctacgccatctcaccctttaaagagcttctgtgtcctcccagtcaggcatagccagtccattctgcttattataattatctttctaaaattctgttttcaaccaatactcttttcaaaggcctcttaagacttagacttgtcttcacttggaattagtctctttaaacatgtacttcagaactgtccagtctttatctataactgctgtcatttttattcttcattgaaaatgctcttcctcctatgaatgtcaactttctttaccttgtatgcttaactattctattctgtcttaacttttgtttgattggctattcttctttcttctctgttgtcttccaaagcttgataaaaactcatctatcatctttactagcactgtcaactttgatattcatctcattcatctaaatattgaaatattttatgtttttgtagaatgttcttattttacatataagtacatatccttttggcataaactttaatggactatcaatactctgtatccctagaattttattatattggatgtcttacatttttttttcattttaccttaaactattacaagttaatggctgttttaataactggatcatcaagtggagtttgggagtcttagggtagttttttggtatgggtctttatagttgatcttgatacaccatatttcatcatcctctattaacatctaaagtgcgcgttaaaactgatgatggctgggcatggtggctcatggtgtcagacacctgttatcccagcactttgggagccaaggcgggtggatcacttgagctcaggagttcgagaccagcctgggcagcatagtgagacactcgtctcaattaaaaaacaaaaacagaaaaacagacgatgtcttctcataatctagagcatctttttctttcttagaggtatgtacaataatggtggtaagttttaatgattgatgacagactaagtgcattattttttctagaattaaattttttttctgtcaacagttttctcagatatgcttattggtgagaggggtcttttattttttgataaattttagagtttgctctctgactagtattttaaatctggagaactgggtaaagacatgtacacatgaaaaaaaggttgtattttagttatttcacatttgatacttagagtaaacctgctttttaaatatatttttttcttttaggtggaagatgaaactgttttacataacattccttatatgggagatgaagttttagatcaggatggtactttcattgaagaactaataaaaaattatgatgggaaagtacacggggatagaggtgagccatatgcttcttctcttggaaaaaggggctaaagaattgagagacacttttgtttatgaagcatatagggcatgagaaaaattttaatattaaaattaagttttgcactgaactataagggactgaacctgggcccaggcctaagattttcagtattttccctaactatttttgggaaaattagttaggaggatcatgtttgccacctgataattatgcatagttggttataacataatggcaataacatgtaaattaaatagaacttgagtgtatgtagattttaagattctttagtagtaaaattaattaggattggggctctgcttctgtggcatataggggctccaacagcccctactactaaaaaataccgctcctctagggactacagtacctgaaattcaatccttagagtcatggtttcagttttttgtgtccaggaggccctgttaaagtgtctgaaaggataatatttgtaatatcatcatccattgtcattatcagcagaaagcagggtctgaaatgatcagttaaaggacagatccattgtttgggaggaggccaaagccacaatcagttcctagaagattcagttttctactagaaagttttggggaggggccattctacagaaagtagcaggtattaaagataagtttgcttcctttgcctaacaccagtcctgaaaatgatcttatcttttcctcccctcatttcaataataatgttttagtgccagttactaggctatgcctgttttgtccaagtagaaaaaggatacataaacttttgacattattgcttctcctgtgtgtttctgacatttgatgcgtttcagaatgtgggtttataaatgatgaaatttttgtggagttggtgaatgcccttggtcaatataatgatgatgacgatgatgatgatggagacgatcctgaagaaagagaagaaaagcagaaagatctggaggatcaccgagatggtatgcctgattattaggattctgtgtagccattacagctttctttcaaaaacagtagaaagagtagaaatagggcttagtttcttctttctctttttctttctttgttaaatatcacattgatagcagtataatcaaaattaacatattatggccaggtagggtggctaactctgtaatcctagcacttgggaggctaaggtgggcagattgcttgagcccaggagttcaagaccaacctgggcaacatagtgagaccccatctctactaaaaagtaaaaaaatgagacagggtgattgcttgagcccaggaggtgtaggctgcattgagctgtgattgtgccactgcacagtctggctgggtgacagagtgagaccttgccttaaaaaagaaaaaaaaaagcataatacttgcaacattatcttcacttgagtatctttgtttcctttggctagcaaagaacgtaattttttgtgtgcttcactgggcatcattataatatataacattgatattcaccgtgtacaagttgtgtactaatcacttcttatgcaccagctcacttaatcctcataatggcttcatgagatggatgttattatcagatccattttctttttcgagacggagtctcgctctgtcgcccaggctagagtacagtggccccatctcagcttactgcaagcttcgcctcctgggttcacgccattctcctgcctcagcctcccgagtagctgggactataggcacctgccaccacacccagctaattttttgtattttttagtagagacggggtttcaccgtgttagccaggatggtctctatctcctgacctcgtgatccacctgcctcggcctcccaaagtgctaggattacaggcgtgagccactgcgccccacctgtcagatccattttctatttgaggggatagatttagagaggttaagtaacttataagattacactattgggaagaaacagagtcaatagttggtgttctctacttggcaaagctcatgctaaggcagcatagaatagaataatttggcgggtgaaatagcaatttctaagaagcgtatttcaaaaaagagaaaataacaaaaaggtaccttattgaccttattgatcatctagttcagctccttcattttacagatgagtaaacagacccaagaggtaaagtgatcactctaagtcacaaaatcagttagtagcagagctgggagtagaacctaggttttctgcttcccagtgctcttaaagcttttcatatttgaatttgaattttgtttttgactgactggcattccacagacatgtaaagtatgtgagaagtaagtaaaacacaaaatagagatgatttcttagaaaatcagctttgttatagagacataattgggtagagaaaatgaaagatcaaaaacttgtttacttccattctttttttcctttcatattctcctgtttagataaagaaagccgcccacctcggaaatttccttctgataaaatttttgaagccatttcctcaatgtttccagataagggcacagcagaagaactaaaggaaaagtaagaatttgttcctttgaggcaatcttgccctgtatggtatgtaactcaccattttggtttattacaaatggaatcaatgtagcggatgagccactacactttgtttacagtgtttgcaagatacttgaagcaacatgtgtacttgtggtactctgcattacaaaatatttcctgtagatagaataaatacatatgtataatttatatatacacataaacacacacatatacataaaatttacagtagtacatttacaggaaaattatctggatactggtagaaatttgatgtttagttaaaactaatataatatccttttccatgatatatttgaatcatatcgatgaatttgattcttgataacaccatgcacaatatttagttggctctttatctaaatagagccattcctttatgttttaggcaagataaacatcaaaagtaacacatggaaaccttttagaaactgttttcaaaaaagtgatttttgtttcatgtttacttaaatttttcttggttaatgtcagatataaagaactcaccgaacagcagctcccaggcgcacttcctcctgaatgtacccccaacatagatggaccaaatgctaaatctgttcagagagagcaaagcttacactcctttcatacgcttttctgtaggcgatgttttaaatatgactgcttcctacatcgtaagtgcaattattgtacgttttcattttctatctttgttgtggaattatgttttaaagcagcttggagagtgctatcatttattacaactagaatttatcatttaatcttgtagttactttgacaaatatctttagatctcagtattattatttttactttgttgcttgaggattgctctgaaatcttttgcatgtatttcatttggactactattttccactaacatggaattcaggtcagtgatttttttttttttcccccgtaagtgctaactaagcagttgttttacaataaaactattattatgaactggtagcccagagcaacattgctgatattgatgaataaattgtgttaaataagaaattggccaaaaaaatgttcaggtaagtgcttgtcgatttaatgtaattttattttattttattttatttttttgccctctgggtaagttgttttttaaaaatacctgcatttgaatacaagtaaaacgtaaaatgttcttagtgaaaatgtaagtatggtatatacaaaaatacttttttcctctggcatttctagggaatgtggtttcttagtaaattttcctggtaattgaaacttctaagcacagtttaaaagcgtcaactacttttgaggcacatattttgaaaatgtatttaatacttcctaattttcctagagtagtttgcttattatagtttggtttttcctatattgtattttagtacgtctgtctatggcatggtaatttctttaggggctttgacccattgtaaaatcgttttcccctgtactcaacggccccacattgctttgttgttttgagttcctgtgcctaccattgacagatttattcctcctcgttcaccaatgataacgtctttttaagcttgcccaagcagctgtacctcacctcctcctaagtgtttgctctacttgtttttgctgcagctaataatgtgttgagtgatgtaatacattggtctggaaatgttaagttttgtttttgtgtgtgacatattagtggtttagttatcttaaaatagaaaaacttgaagtagatttttagaattatcattatattgttacctccttgctcttgttctaactcctcatctagtttaaattgatttggtagttttaaaaattcgtagtaagtcatccatttgttgcttcagccattggacagttaagcccttgaaatagttgtcttgaatttcattttaatttccctttacacaccatgaatttatgaattacatcgagtttttattaagactattggacattgtatgtagatatcactatagcaaaagaattgagtggaagcactattttggagtcgctgaaaggtccttccaatttgttgtttatagatgtagcatttaataaagtttttttgctgtaaaaatgaaccatagaagtaggacactacttttaaacattacaagttttttattgtgccattcagagatgagtaatttttttttttgttaacttgaatcttgaacctgttacttacctcattctagctggggagaacagtggaatattttactttaataaagttggctttcatggggctaattggctgcctccttgtagcatttggtggccatgggtccaactgtgctaggcccacttttacttctttttacagtagagccagtgtcttcatcattcagtcctattgagttctgtaggaacttcattgttttacgttaacttcgacaaaataccacacatggtatatttttcttaggtaaaataagttactaaataaatcattaaatatatataatcatgcattacttatggacggagatgcattctgagaaatgtgttgttaggtgattttggcattatgtaaacacagagtgtacttacacaaacctagatggtacagcgcatgacacacctaggccacatatccctgcagcatgccactgtactggatactggaggcagttgtgacacattggcaagtatttgtatgtttaaatcataataaacatagaaaatatacagtaaaaatacaatattatcttatggtaccactgttgtatatgcggtccatcattgactcagatggtatgcagcacatgactgtttcttttttgttgttgttgttgtttttttttttttttgagacgaagtctcgttctgttgctcagtctgaagtgcagtggtgtgatttcagctcgctgcaacctccgcctgctggattcaaaggattctcctgtctcagcctcctgagtagctgggattacaggcgcccgccaccacgtccagctaatttttgtatttttagtagagatggggtttcaccatgttggccaggctggtcttgaactcctgacctcaagtgatccacctgccctggcctcccaaagtgttgggactacaggtgtgagctaccacgcctggtcgattttatgttgaatatagcattttgtgctttagttttctggtctcttatcttggggatacggtagtacttcctttacagagctgttgtgaggattagatgaattaatgtggggaagatacttaaaatggtacctggctcttgttagctattgttgtttttaaaataggtcatcattcacatggtttacgtttccaaaaagtattaatatgaagatgtgctgggcgcggtggctcatccttttaatgccagtgctttgggaggcagaggtgggaggactgcttgagcccaaaagtttgaggctgcagtgagctatgatcatgccactgtactccagctgggtgacagagtgagaccccatctcttaaaaaaaaaaaaaaagtatgaaaatgtgtacaataaagtctcccaatgactttctgttccccatccttcgaaattttacctcactcttccacttttattagtagttaaccacttttattggttctcgtattttttttacagtttctttgacaagtataaagatacccttttttctgaccgtcttatttacatggtggcatagcattcaggcttttccctttttttggaataaggataggatttaatattgtagctattagctttatctgtatagctgcatagcctgtgctgtaggaggttccagaacttactggactggtctctaatggtgaccatttggattattttgagccttatgctgtaacgatgccacagcaaatatctgtacccatttcatgcaagtttaagtttacctgataaactctatttaggtattgccaaatgacctgccatatggggatgcagcactttaaagccctaccagcaaagtcagagagccctgcccatagaaggtgttaccaaactaatttttaaaattgattttataagtgaaaaatggcttttagcattatttttaaattcttgtttttctttgttttttaatctctgcttcccacaggtgataagcattgttttaatatctggatttaattcctttgaatgagggtaggatcttcctatatgttgaagagtgaactatttttattctttgtttttttgattttgtgagacgggtctcgctctgtcgcccaggctggagtgcagtggtgcagtcttggctcacggcgacctctgcctcctggattcaagtgattctcctgcctcagccttctgagtagctgggattacaggcgcgcaccacctcacctggctcatatttttatttttagtagaaacagggtttcaccatgttggccaggctggtctcaaactcctgaccttaggtaatccacccacctcagcctctcacagtgctaggattactggtgtgagccactgcgcctggcctatttttattcttggtctcatagatctttttgatgtcttaggagctttttatataatcaggaaattaggttttttgaaatatgagttgcaatttttttcaagtttatttggtaaaagtcccataagcaaagtttaaacttttttttttttttgagacagtcttgctctgtcgctcaggctggagtgcaatggtgtgatcttggctcattgcagcctttgcctcctgggttcaagggattcttgtgcctcagcctctggagtagctgggactacaggcatgtgctaccacatccagctaatttttctatttttagtagagatgtggttttgccatgttggccaggccggtctcaaactcctgacctcaagtgatctgcccgcctcagcctctgaaagtgctgagattacaggtgtgagccactgcacctggtcagtttaaacattttttaaaaagtagttgaatttatcagttagctttcccattccaagattataaagcgtttctcactttttctagtatgttttaggcttcatttttaaaaacataaatctttgatccatttggaatttaatatgatgtggattataaatctgatcctcctcctcacttccaaagttgcctagttgtttcatttactgaaaagttcatctttcactaccttgagatatttccttcattgcctgttgccatatgtatttgggtttctcaacattgtgttcctttagtctattcatgaggcggtattcagagatctcctggcaattcttgtttttctatataaatttatttatttagagagagagatatatatacatacacacatacatacatacacagggtcttgctctgtcacccaggccagagtggtgcagtggcacaatcatggctcactgcaaccttgacttcctgagctcaagctcttctcctatctcagcttcctgcgtagctgggactacaagcatgcaccaccattgctggttagttttctttttctttttttgagatagggtctcactatgttgcccaggctggtcttaaactcctggcctcaagtgatgctcctactttgggctcccaaagtgctggaattacaggcgtgagccactgcacccagcctatatacatttcaaaatctgtttgtctagttctttttaaaaaaaattagtggtatgtttattggaatcccattaaatttataaattacctaatttctttttaaaatataagggttaagtctaactaaccataccatcacctctctttttgtgtcctttaattatctcccaagttttctttatgtgactcttgtacattttttgttgagtatttctaggtattaaacttgctgctgctgttgggctttttccacattttgtcttctgttttgtaccctgctaccttactgcattgtcttcatgttttatcagtttctcagtacattcttaggagttttccagctgtgtaattatactgtctgtagttattaatggttttaccttctatccagtctttataactgaagcttctttctcttttctacctactttatttatttattttttggttgggcgggggaggggagtggggaggctttctgataaaaaccagaaagcctgctagacaaattctaaaagagctgtaactgtcttttctacctactttagcttgtagtttcagtacagtttaaaaattagtagtgctggtagatagagataaatgttctgtctcttctggatgagttttagaaaattattctttacatccaggttttgagatttatttgtatgaagtttatgtgttctctaatgttcgttttatttttgttaatattcttgttctctatatatttcattgtcacttttttgttaagaagtggtttttgtattttaaattatgtatttttttcttcagagaaccagctacaatgttagtttaactcataaacagaaaaacagttgtattagggttccttaacaaacgtaatccagcaccagattagtattggtgttaggctgtctggagcctaattgctcacacgcttccaacagaatctgagccttgaatttttcttctttaaaaacacaactttgtccttttttttttttttccttccttttctcagtctttaaatatggctttttacaaatatttaaaagatgatttgttttgtggaaatgtcacttgtttttctccaaattaattttcatcttgtataattctgaatagtccatttccagcatttcccttttgtatatgaggaagtaagtttttgcaagaaattctgtgaagttagcactgctgtcaatgttcacactcttttcatgtagcagtgtacccgcatttgaatctttctgttacattattttggaattttaggtttcaaacagtgtatctttctaaaatccgtttttttgacattgtaattttctgtggcaagacactataagctctcaccaggttcttggattgggtatgattcacaggaattgaatgttagtaatctggggctgtcctctttatcattaaaaatgagtttttacaactggtgacaagctgattgctgacctttctttagaaatcaagaaattgtatgtcagaattaaaaataggaaatctgatttaattgtagagggtctatcaactgcttagacagagatagtaagattcaatttaagtaaatgtttataaccatagttatgcgcatcagttttacttgcaaggagaaaaatgagaaatcacgactcattccagaatttactgtttttccttcctgcttaatggttggaggaggaggaatggagaatacgttgtgatcattcagtaagagcctgaaggaaagttgtatgaagtaacgtaaaccacatattagcaagattataatccattaattgacttttccagtggaactggaagagtgaaaaagtaagtattttatagttatattagattctttgtttcatttattttgcagcttttcatgcaacacccaacacttataagcggaagaacacagaaacagctctagacaacaaaccttgtggaccacagtgttaccagcatttggtaagacttagtgcctaattattgcagagggtacttgagaggactttgcactttggtggaggtgatcaagtcagcgttaatgttgtctgcacccatgctgttatgggccatatgatagacagagctttctcacccatgctgtttcttccatagctcatgtactgcacattttagtccttcattaatgtggtattattctttttaaaatctgtgttatctcttcagcaacatttcaaggtctttaggatcaaggacttttatgccttccacaaagtctatgagagttgcaaggcacagatagtccgcttagaaagcaggcatgcagtaatcatacgcagtagatcccaagcccctctcatagccatatccctctacttgagttttagatgcactgtcatttcagctatgtgataggttccacagattttttttttttaaatgatggagaacaggtaaggggttaggaaaatatgaggtagaaaagttgtttttacgggtactctcttatttttaccatttcccctctttgaaccaagccactcctacctaggaactaaatgggtatatattgcctgttggattttggacagaagattcattgaatggcacctgcagaaggtatcctatttttaagcaatttggtttttgtagaatgaagtataaaactgttggctgctgtcaaacttctcccttctatttccactaaaaaaatggaattcttgagcacttgttttataatattctttacaaggcagaattttgtttggctcatctaaaatgtttctgtggtctctataaaccatgctcttaccattgttttatactttgagactggattattgtacttcataatgcaagatgtaaccctcacagtcttattcctgaagttcctttcatgtcttcctgtggctgtgtatccttcacaggaaaaaaaaaaatgttggatgttttaatagtaagacaggaagtgacaaagtcaagcatgtttgtgttttgtgttcttgtatagttgaaatattaacacgaagaggtatgcattatcttaaactctgcataggtagtctgactccgtgcacattaggtatatgattcttttgtaaagattcacttttaaatagactgtatgtccatagagataattacctttattacatgaagtatatttcatactttatcttcttatattttaacttaattataactagctaatatattttacaaattcacaatatagaactgtcttgcctgatttttgtaccattctaggaatatatagaacccatatttctctttctgaaattttcagactatcaaaagcatatcaaaacaagtatattagacatgcaaatgattatttgtgataaatggataatgtgatacattttttgactaacctggcttatatagtatttttttttctcttccatcaaaatgagttttagaactttgccctgatgttgacatttttcatttcgtaggagggagcaaaggagtttgctgctgctctcaccgctgagcggataaagaccccaccaaaacgtccaggaggccgcagaagaggacggcttcccaataacagtagcaggcccagcacccccaccattaatgtgctggaatcaaaggatacagacagtgatagggaagcagggactgaaacggggggagagaacaatgataaagaagaagaagagaagaaagatgaaacttcgagctcctctggtaagacacgtctaataactgggttttactgttctgtgaaagttcgtgttgtgaggattaaggatgtataatgcattgaataattttcttagttggttagtttcagtataaagaccagagttatctcaagaatgtgtagctgtgttgtttctgtttcctgcctgcacccgtaccctagcttgtggtgtttgccctgcttggttgtttgaaagctgatgatgcactttattctcattctttgtgccattttcttttttcgatctttctcaggtagggaataatgaaatttggatcatttggtttaatattcttgacgttctgtgagtagttttgttggaaaatgtgaactacgatgggttagtgttttgccgattggatttgagttgtcctcatcttttcgcttttttcttaagcacaccctgaattgtacttcttaatattatttccaatcatttcttgaccagtgcttacatttggttttgtagaagcaaattctcggtgtcaaacaccaataaagatgaagccaaatattgaacctcctgagaatgtggagtggagtggtgctgaagcctcaatgtttagagtcctcattggcacttactatgacaatttctgtgccattgctaggttaattgggaccaaaacatgtagacaggtaagatatccgataaaaatgttgttaaaagagcttcaaacatagagataaaactgtactcgttgtccaaacaaagaaaattcttggttattactaagctcctattcatctcctaaaaataatttttttttcttcccaagagggaattgaatgaaaattattctccaggtatgttacagaatttccccaatgtagacttttaaggttagatagcagtagcttttaaaagctagtaagaattgaaatttagcatcacagttcttgaccagaatataattacagctacccctaatgtgagggtagggacagcgatgtgtgttatatccccagcatctagcagtgtcacagaagagacaaagacatttttctggtatgcatgagtataagaatggtttgcctaaataagactgtcctcatggctctgtgactgtgcctcttgtcaggtgtatgagtttagagtcaaagaatctagcatcatagctccagctcccgctgaggatgtggatactcctccaaggaaaaagaagaggaaacaccggtgagtctgtcatgaagctccttagagaagtcaacatagatagacactgcaggcaaggcccttcctaagggctgttgttggtttctacttagtctatttttaaaaaaccttaaactgccatcaaaaacagaactatggaatcttatttccactgggaattgctagtatttttctataagaatacagcagccttcagtatatttggtatgttaagagtcataaaaattacggttaccagactgcatttgggttaagaaaaacatatttagtagcttttgcagtaaaggttacgtaaacaattactttaacatcatgaaatgttctgtgtttctgatgtgagctctgggccagtttttagaagtatcttttattccaggagcttgaatttctaagttgtgtggcattgcattccgatactcctaatgggtaccctactttaagcttgtgtgaatgttattttcaccttagcgaatgttttcaggctgatttgatttgtaaatgtagaaccagaaaaattgatgagtggactatctgctctaatctccccatacctctacctcacatttttaaaaatgagaaacctaattgggtaggtaagggtgcagttagattatgcttcttaaattgtgtacaggctcatgttacattttcttactttaacaaaaataagtgtagggccaacccaatttagaatttttttaaagtcaagtttttatttttattttttaggctttaggagatgcttctgaaattttggttgaattatttctgaccacgtagttcacttgcttggtttatgatgcctgaaataagaggaagtgatcagtgtcatccacatcagaataaatcaacaggcagacacacctgctgctttgtgcagcattgggagctcaggagttctgaccaggagtcatggatgaacacaggaaatgacgtcttgccacacctggggcagcctgagccatcaagctgtttgagttgcttcaaactgatggcaaatataaactgggcagggcatgactcttggctttaacgcattcctgtattcatggcacagatagatccagttaagcagctctctgttggatttgtagcttcccgcagaaatttggtttaattttctttgtgtttttgcaggttgtgggctgcacactgcagaaagatacagctgaaaaagggttagcatctttccattcctctcattattagcttaacaatatctgctttgttttcatttgttttagaatagtaactggattagagcttgggttattctaatataattgccttctgtatgttaaaccaatttgaatggaggacgtctactgatgaatccccagtcaattctcttctgtaaagtggaggctgactggaaggtgtgagtccgagtcagttgaaggagaagtgctttgggatgggactgagatgtagccgtgctttagatggaactcataagcacttgggggtgggagagtattttttgccatcgttgtggaaaccggaatatgtgtaatgttatgcattcagtaaaggcaggccagctacactccacaggtagtagggaagaatgtactcgtgttaattgtgtatgatcgtttccatctccctggattcattggcctgcatgatgttatctttactcagacggctcctctaaccatgtttacaactatcaaccctgtgatcatccacggcagccttgtgacagttcgtgcccttgtgtgatagcacaaaatttttgtgaaaagttttgtcaatgtagttcagagtgtaagtatttgttgctttgatgcaattgcatgagaactaaataggtctttggttagcaatttaaaaaatcaaaaataagaacatgggagcactcccttgtttacttgacgaaactcatcaatttgacaagtatttattgagccccatacctggccctgtgccagtggccagtcagtcgcctgggtgttgtgtgtctgtgtgtgtgaggcaggcaaagttgtattaaaggaacctgaattttatttttttcttctttgatcatttaaattaagttgtattaaagttggcacagattgtaagaggaatctagaaggagctacccaaataatttttgggcaccagaaatcgtcagagttaggagggttttagtcttcagattaaaggaatgtagcataaacatagtagatttttataattgtttaatgagactgcacatgaagcttgggtattaagggagtgtttagaactaggggctattggaatggtcaaggaccatggatattgttccatccagaccctttattcacaccgactttaaatatatacactatttaacaaatgaaaaatggaaaaacaactcagtggtggtctttttcagtgcaaacagctataacttcgctgttaatacttccatttccttgtctatatagtagggtaataaggtggttgtgagggttgagagtcagtgagatgcccagtacagcccttgccacgtatctttctgcaagtttttgcatacggtgatgagtgaagaacctccaaacctctctctgaaggtcaaaaccgctttccgggatgccgctgcaaagcacagtgcaacaccaagcagtgcccgtgctacctggctgtccgagagtgtgaccctgacctctgtcttacttgtggagccgctgaccattgggacagtaaaaatgtgtcctgcaagaactgcagtattcagcggggctccaaaaaggtgagcaacaagtcacttctggaagattgtttgtagttagctatttagtgatgcaaatgtcaggattgccttagatgatttagctggggcaaaaagtaaaagtgatccttgaaaggtgcaactgatgagaaagtgttcataattttctctgggtaatgcacccttgggcagtctcttcagttttatatagagcaccatactctgatagtaggagaaaccagcaaattctgagaagtagccattcatggtatcagatttaggaataagaggtattttttctacctgtttaatagattatttgaatttgtcttttagttaatagtttatctagtatccttaatgcaaataaatggtgatttctatcaaaatatagactcattctcatcaaagagtatttatagattccttgctatgtagagtaaaagatgaaatttcccatggcaggtttttatagacttacttcctgtttgtttaataaccttgaaaaaaacccagctaggaactatatatttttagtctggggaattgtatgtaggtgagttaactctatcagccaggaagtaatgattgagcaaaagacacttcagcagcatgtatttgggaaatttcgtatcttttttttttttttagggcagatgataagttctttcttcagtcagttctttttataataatagctgacatttattaagcatgtaaaaataggcactgttgtgagtgctttagtggatttgttcattgattctcctaaccctgtgagtgaggagtaagtgttaacccccattttacgggtaaggaaacccaaagtcacaagacttgtaaaggagcaggagatcaaatcctccaggctcccattaacctgctcttatgctctgtgtgtgtgtgtgtgtgtgtgtgtgtgtgtgtatgtggggtgtagagtagacatatctttgttgttggaccatttatttataattgagaacacacttcttaccagcaagtccccttctaccagaaattctgctccaggcaaaacattgaagttctcttggttttgtttgtgtctttgaaccaaagtctgtgtttatggcagagagttgtgcagggtggtgggctttttgtttttagctttgacttttttcttttctgttagacatttagatgattttactctaggcagttatatgtccatttaggtcattggatcacagtgactctggttccgtttccgatggcatacctgctcagacctaaaaatctcaatttcccccccaaacaacttaccattgtactccttcctcactttgttcagaaagtgggcaattctattcatactgacatgtcctctttgtaagacattttttaactcttaaaaatgttaaactatgtagataccttttaccagttgggtttcatttgcatagcagtatttagctaatttagtttctgatcagaaggctatttgggaagttcacatgacaggtgagtggtaagatggtccagaataggaatagataggaagcctttgtaaaggtcacaagaaaattttggatgaaagcataatactgagccgtgatgaaaaattggcatatgttggggaacacatccctaaatacataatttatagcaatgatcatcttggcatttctgctgaaaatagactactggactgacaagatcatgataacacctcccggtagtttcttgtgttatcctgaggaggtggggtggaagaacaaatccaaagccaagctgctatgggcttcagagggaaccaacgccagtgaagaatcagggggtgtcctggggctgaaaatggaataactattaatagaatcacttggggaaagtagagggaaaggtatggagaggaagagtgatttggtggtgtccttatattaaattcaggttgaaagtgaattactcgaggaaatcaagggctgaagatacagggaagccaaaagtgcagcaggcctagagcaccttgctgaacgatggtcattgcagaggaccaacaccaccaaaaggttttctgtaagacagagattcttatctgctgtataaggaaaacataatgttcatagccattctcagcagctttcacgttgactgaagctgtgtgcccaattactgccttagaacaaacaggtctgaggatttacagtgatagcttttgttttcattctgtagtctactttgtccccagtccattttcaccctccttttttgatgatgtgattgtgttttattctctagcatctattgctggcaccatctgacgtggcaggctgggggatttttatcaaagatcctgtgcagaaaaatgaattcatctcagaatactgtggagaggtaaggcactgataacctgtattcaggtggcattgtatatactaactttactttattttagattgattttattaggtaagtctgtgggtttgattggaaatgaattgccataaactgccttttcagcctggacttctgcatgtttgtggatttgcatgcttagtaactggattgtgctgggcgcggtggccgactcctgcaatcccagcactttgggaggccgaggcaggtggattgcttgagctcaggagttggagaccagcatgggcaacatggcaagaccccattgctacaaaaaatgcaaaaattagccgggcgtggtggtgcatacttgtagtcccagctacttgggagctgaggcaggaagatcgcttgagcctggaagagcctgggaggttgaggctgcagtgagccatgtttgtgccactgcactccggcctgggcgacaaagtgagaccctgtctcagaggggaaaaaaagcaaaacaaaacaggattgcttggttctagccacatttagtttttctcgtctagggacaacagggagaacaagagctttaccatagagtggcctgcttaatccacaacctagttgataaggacctagaaacaacaacgtcattagttattcaccttttaaattgtcgacagtgttaccgaaaaatcataggcctagcttcagtttggaaccagctcacccaaattttttttttttttttttttttttttgagacagagtttcgctcttgttgcccaggccggagtgcaatggcgtgattttggctcaccgcaacctcagcctcccgggttcaagcgattctcctgcctcagtgtcccgagtagctgggattacaggcatgcgccaccgcgcccaggtgatctgcccgcctcggcctcccaaagtgctgggattacaggcgtgagccactgcagccggcttttttaaaaaactcagcaaaaagactttggttcctcactttctccaaggataattacttcaggatgtggaaatatttctgagttggggtccttagtatacagttattctttattactgcgcagaccgaatgggaaagagaacttggctgtagtgaccctttttgttgcgttttctccagaaggtccagtattcactctgtgcgcttttgtgtgttctgtcaggcttgatcacctttatccaaaagaattttctcctgtgtctttctttttagattatttctcaagatgaagctgacagaagagggaaagtgtatgataaatacatgtgcagctttctgttcaacttgaacaatggtatgtttcagagctgggaggcagtgagttcctgagttgcatgtggcagccttctgccggccgagtgttcagaaacgagggtagaggtcagtgaggtgaccagaaggaggatctccttagaggcatggggggctgcttgcttgaaaggaactggagcaaggaattcctcagggagcagatagactagatgtgcaggaaaccgcctctctggagtcccggctgtctgtgggtggcactatcccagcatctggctgtgaaggggacgttgtgctcttgctgctcacctcacctcttgtgttcaggcagctcagcacacctcctccagtcagtgcctctgagcggggaaggaggggaggagcactgcatttgcaaccatcttccagactcccctggatattctcaaaggactgagaggaaaggcagctgctttcatagctgatgttctggggtagaatgtaaggctgtgtagggatgtttctggtgggattatgtgaaaatggaggtaggcttaacatgtaagatattcagagaaactcttagttggaacaagtagaataggtttttttctatgaatgctttatagacattataatgaaaaaaactaattttaaatgtgaaaatgcctattcgtgatgtttggaagaattttgtcagatttttttttttttttgctatgttttgctcagtaatgtatgtttatagttgataattaatagcttttgagtcagataaccatcttgaattataggtgattaattttaacctggaacaatagtgtgttcttccaaatgtcatttcttactgaatgaagctgcttgatttatttgcttttgcaggcaaaccctgaagaactgtaaccagttgcatttacaaaatcataataacttggtttacttataactgaaattattcactgggctgtgcttacttttttctttttagattttgtggtggatgcaacccgcaagggtaacaaaattcgttttgcaaatcattcggtaaatccaaactgctatgcaaaaggtaggtacctttgacgtgagaattggaactcccttttcagtcctgtgatgatggacttgaatacttctgggatagttgtttgttatgtgaacaagtcagttaaccccccgtggcccgtcttcatgctcactgacaccagtgtgtctctttgcagttatgatggttaacggtgatcacaggataggtatttttgccaagagagccatccagactggcgaagagctgttttttgattacaggttggtaaagtacatttctagcatgatctctaagggctttttctactggattgtgaactctggacaaaggagggtttttagttctttgcttcttttgatgggtcactttgccatgagcattagtggggaattaggttacactttcctgttatgtatttattatccatttatatattatacaaggcatgcttatttttaaaatagagtaaaatccatgcagaaagccccatttctcaccctgctgttgacagctgggtgagtcctagaccttctcatatcatgccgcatgctgcatgctcactcgtggagcgttttccagataagtgcgatcacactgtcctatagatttttctgcaacatggttttacttgacaatatactatgcatatctttatggattagatctacttaatttattgtttgctataatacttattacacatatcattaccattttaaaaggggctgttggcaaatcgctgtctgatcaccctgtggggatgcctgggacacgtgggccaccaatggtatctgtgtggttaggcattaggctgccagttgacactgtcaagctctgtgggatacatttaagtcagccattgaatacagatttaagtgcagtcagatgactgtctagttaatgaactcctgtagccccgtgtacatcccatccagaagctgtctttgagtactgtgttcttgcatattcaggctggcctttaatggctgttgcacagcagcgagctctcagtgaggcagacagggtctgagtgaagggcccactttagcaaaggccgctgccttcactccaggctggctctgaatgaagagtgtggggtggagcttccttgggatgacccggtggcctcaccccccatggtgggcttcttgtgctcctctctgggtgtccgctgcactccagttcttgcttcacctgggggagcaactggcgggctgctctttggccctctttgctatggtcatcattttttccagaccatggttctattttgccttcccagcgtcaggcctaagcatcctgatgtggaccagccttcctgggaccacttgcttcagaggcataggggaggctggtcaggctctgggaatgcttgtagacaggtttgttcacttcagaacttggcagcgtctcaattagatggccagcaacacagacctatgcattgccttctatgaatgtgccgttatgcaggcagctgtgtaattggatgggttttttttttttttttttttttaaagacattttaatgcacccactatcttcagcaggctttgttgtgttaagtctcagcacatgttggatgggtggccatccagcggacatctccttcctgttgtttcagatacagccaggctgatgccctgaagtatgtcggcatcgaaagagaaatggaaatcccttgacatctgctacctcctcccccctcctctgaaacagctgccttagcttcaggaacctcgagtactgtgggcaatttagaaaaagaacatgcagtttgaaattctgaatttgcaaagtactgtaagaataatttatagtaatgagtttaaaaatcaactttttattgccttctcaccagctgcaaagtgttttgtaccagtgaatttttgcaataatgcagtatggtacatttttcaactttgaataaagaatacttgaacttgtccttgttgaatcatctctcataacgtgtcaataactgctttcaggactgctcaacaaaaaacttttaaatttaactccttgggttttttagttgtctttgtatgaatcttgatttaactaatactgcctgtgaatatgtggaagacatatatgaagaacactgctgtgcatcctgagggcttacccagtaaagggcttgatcttatagacaagaccagggtgggtacgttccagtcagctgtgcaacctggagaaagagatttaacctccaagtctgttccccatatataaactgacagagtagacttttaggttatttttaagaacgtacctagttctaaactccattagtctagatagagttctttagaaacaaacacaatataagttgggattccttacctaccttatcacaaaaggtgattgataggtataaccaaactgtagttttatatcttctcagaggtaaaaatcacaaactctgaaagcgtcaaggaaacgacatgtaccttgcatgccttatgataatgtggtttgtcccagaatttgaggtaacttccctgcaccctccccaggtacattcaccagcagcatcatggga

SEQ ID NO: 21 - DNA, 41617 bp, Homo sapiens
ggctaagactattggtttcagcatctgggatgttttctcacagccgaggacgctgaatagaaaactgccagaaagcgggaggggtccccggcagcaggtcccgttttttctccccacctgcctcccgggtgctgcggcttccgccacgacagtctcgaccctgcacacggatttttttcctccgttccatgaaccaaacataatgattctggtttacatatttaagcgaaggggagaagaaacgcgactctcaggacccaagggctgaggcagggtttttctgtctcaaagacctccagttaagacatttttctcctgcaaagcctttcctacaatgatggcttaatcgtgtaattatgtaaaccagtcacaacctggatagctaaaacaaaaaaaccaattccctacgcccgagccaagcctgctccccctcgccgtgccgcatcccaaacaccccgcgctcgctcagccaacggccaggtttcggttcaaccgaaaaccacgggaagtgggaggagctactggctcaagggagggaggtgggacttgacctccgagcaacggccccggtgattggccaaccttctgccgccgccaccaatgggcaggcgccctgaaacgttcggcgagccgactgcggctgcgcggggtattcgaatcggcggcggcttctagtttgcggttcaggtttggccgctgccggccagcgtcctctggccatggacaccccggaaaatgtccttcagtaagtgtccgtctggtggggtggggaagcccagggggctggggcgcctggggttcgggcccggcccgccccagacctgccttcttttgcccccttcgcccccttcctgggtttggaatgtgtcccacccagcaaggccgtgggctgcttgagagccggggagggctccggcaccttgggttccgctgaggcccggcgcttgtccgcccatctgcgccgcggtggccgtttggagcaatctggataattcgttaggccctcagagctctcgtttattctttgtaaggaatcccctcctgacagttcaacctaacaaaaatcctgaaccttgtgtttagattttgtgatacgttttcaaagtcacgtatttaacaattcgactacagtagggaacgaatttaaagttgctctcctatccataatctcactgctattttttaaaagtctttgaatacagggtactttaagaaaaaaaaattgaaaaaaaatagctttgctcattattgagtgatgtgtgccaacctgctaacatcactcactttttacttaaagttcccacgcctttgttttatgacttagatgatttacccagactgttacttaaaggcatttaaaacaattaagtcataggttcaggaagtaaaactggtccgttttatcagttctttgcgatcagaagaccgagattgttaaatgcagtcaaaacaaaaatccatttgctctaagactttttctgtaaccttcaacctagccagcaaattattttctttcagaagtcccccgccccttttttaaaggtaaagcagatattcctggtcctgttttgacttactaaagattaatgtgctttaatgaactggatgttttactattacagtgcatttaggtcattttactagagaaatgtggttggtgttagaatatgaaatgtttaccttgggcgagcctactagacatattttggaagaaaggttctgaaatagggatttgtccctctgctataagacatgagagacattcaaacttcagaattattattttttttagttttaaaaataagcaatgcgtttatatgactaaaagaagatttagaacagtatttaccgagaactcctgtacctgactactgtcccactctgtcacatgtaaccgtttttctagtttctttttggaaatataaatatttacattattataatatattaaatgtctgcacgtttgtatacattttttgcctttaccacacataaaatataacagtatatatatacgctgctcttttgcctaacaatatccctggagatctctaccaatacataaagttctttcttattctttttttacagctgtgtaatacttcatgtaccctaattgatctaagcagtcaacacaggttgttgacaatctgtttcaaatagtggcacggtgaaaaatcttgtacataacattttgcggatacacatgtgtatgtgtcttctagatctgcagaagcggtttgttggatcaaaagcaaatcagtccagttttggtagataattcccttggcaggaattgagcacatgcccacctacaagcaagatgcgacagagagcctgtttcttattgctgcacctacacaatcttttcacatgttttttagttttgccaatctgatgagtgaagaattgtttctcagcgaagtgaatttctgttatgagagactgaacatttttcatgtttgtgagccatgtatctttttctgtgaaataatttattatgccctttgctcattaaaaaaaaataggttaatagtttttttctcagcttctaaaagctcattgtttttccagtttatcatttctcttttgactattttgtggtttttttgtttgttttggttatttgccatggagaagtttttatttatatatagttgtctttatttagcttttcttttgtggcttctggattttgagtcataagaaacattgatttcattcatataccgaggtgatagctagaagtaaatattgctttttaggcaggacatggtggctcatgcctgtaattctaacactttgggagaccaaggtgagagagtcacttgaggccaggagttcaagaccagcctgcgaaatatagtgatacctcatctcggcaaaaaataaaaaattagccagacatggtggcatgtgcctgtagcctcagctactcaggaggctgaggcaggaggatctcttgaacacaagagttcgaggttacagcgagccatgattgcactgttgcactccagcgtgggcaacagagcaagattccatctctaaaaaaataaaaataaaaatacatattgctttttacatcgttttttcaaaaaaaaaaaaaatcttatagtgtctcagatagaaaacctcggagtcttcctgactggtttcccacttcgattctcacctctacctccttcacacagagggacattaaaatgcaaattaggtcttgtcacccccaccttttcctgctcatcacacttgaaccacactggcttgctttctgttcttgaagttctctcagccttgaccatttccccctcagatagctacgtggctgtctggcactgatcacatgtcaccgcctctgagaggcagggcttccttgaccagcctatctaaaaatagtaactcatcacattctcaccctttctcctattatatgttattttgtttgttcttctgagtacttaatgtaacctgacattactttgcatgtttctttttgtttagcccttctagctctccccaaggggaattttgctttgcctggctgctttttttcagctgtagttgagtatatggaagtgggggatgcagagttctctgggagctctgtggctgatttctgagcactgttatcatctgctcttcctcagggactttgttactttgaagcaatgaaaacaaactgtgtctgggaactctactttgtggtactctgggctgcctcacacccgtttacaatccctctttgactcgttccagccgtgtctcagccatgctcctgggaagcaaaggcaggtgtctgagtcagtgccatgcctggatcccactggaagggcaggtgtctcagtcagtgccatgcctagatcccactggaagggcagaggtctgagtcagtgccatgcctggatcccactggaagggcagaggtctgagtcagtgccatgcctggatcctgctggaagggcaggagtctgagtcagtgccatgcttggatcctcttgttaggaggaggagcaaacttctggcaactgcccctcatggtggtagtgacattggggttccgtgagaggagaaggagactcttggggatagagctgggacttatggaaaaacactggctgcttctgagttttctgactatgtctgagcgaatgcttcttaaaattttaaatactatttggatcgatatttaagattttcattttaatgcatataaatggtgtatatataaaatgattgatatttaagatttttgttttaatgcacataaatggtatatataaaatgaagtatatcttttgcttgtagaaattatccctaatatcccatgtgcatacctttctctcttctaggatgcttgaagcccacatgcagagctacaagggcaatgaccctcttggtgaatgggaaaggtcagcatttagttattttatttcccttaaacaaactatacactgccccatggaaaattaacattatccatatttttctagatacatacagtgggtagaagagaattttcctgagaataaagaatacttgataactttactagaacatttaatgaaggaatttttagataagaagaaataccacaatgacccaagattcatcagttattgtttaaaatttgtaagtatacttaagatgtataatcaaatctataatcatgttgtacttttgctttttaaacttagattgtaagatcattttaggcttttaattccttgtttctagttctgaagatacagagaggaaaatctgttcattctctgattcaacagacttctgtgccactagtgattaaaaagtatgtaggggctgggcgcagtggctcacacctgtaatcccagcactttgggaggccaaggcaggtcgatcactttagttcaggagttcgagaccagcctggccaacgtggtaaaatcctgtctctactaaaaatacaaaaattaactgggcatggtggcaggcacctgtaatcccagctactcggggggctatggcaggagaattgctcgagcctgggaggtggaggttgccatgagccgagatcagatcatgtcactgcactccagcctgggtgacagagtgagactctgtccccaccccccgctcccccaccaaaaaaaaagtatgtgcggacttctctctaccagcaaccagtcaatcaactctgtagttgtgtctccaattcaattccagcactacctgaaaataacttcagattccacagcttaagggttctgttccacaagactgcctctcacttacaatgccagttgcaagccacaggttgttttacctgtgcttctgcctgactggctacaaagcagagttcgcacaaccctctccctgggtctgagttcgatcagtttgcatgagtggctcacagaactcaaggaaacacctacggttaatgttttattataaaggatattattaagaatactgatgaacaccagatgaagagatgtttagggcaaggtattggggaaggtgtgtggagcttccttgccctttccaggtgtgacaccctccaggaacctccatgtatttagctctccagaagcttgtctaagctctatcgttttgggtttttatggaggtgccttacacagacatgattgattaaatcattggccattggtgattggcttaaacttcagtccctcttccctccctggaggttcagcagtggggctgaaaagtccaaccctctaaacctgccttggttttgctgatgaccagctcccatccgaagctacctaggggctcccagcttagctggctaactcctcaccagacatagactagcagttccattattcttatgtctttttgttttgggttcgtgtaggctgagtacaacagtgacctccatcaattttttgagtttctgtacaaccatgggattggaaccctgtcatcccctctgtacattgcctgggcggggcatctggaagcccaaggagagctgcagcatgccagtgctgtccttcagagaggaattcaaaaccaggctgaacccagagagttcctgcaacaacaatacaggtagttacaaagtcaaactctctgtgatgattctgactttgaaaagtaatgtttgctgttaaaaattgtatcattagcaatttgtacagggaaatccttctagttttggacaatgtggataatacaggatagtgtaaagaaaaaaactgctcagaaatattactgttaacaataactggcacatttccttctagtatcttttcctgtacctgtgtgggtatctttgtgtttatatattttaacagcaaatcatattgtatgtctagttatacatacaaagaaatacttaagaaattatgagcttttaaactacttctatagtagttgtgaaatctgtcacagtgttgtgtcataatccactctccaattggacattgaagttgtttacattttgatttttataaacagcaccatgataaatactttttttttttgagatggagtctcactctgtcgcccaggctggagtgcgatggtgtaatctcagctcactgcaacctgccacttctgggctcaagagattctcctgcctcagcctcttgactagctgggactatagggacgtgccaccatgcccagctaatttttgtatttttagtagagacgaggtttcgccatgttggccagactggtcttgaacccctgacctcaagtgatcttcctgcctcactcggcctcccaaagtgctgggattacaggtgtgagccactgcgcctggcctgtgatgaatatatttcttaataacattgttcacatttttaaaactttttctatgattaaacatatctcacttagggaattgtgaaaatacagaaaacgaaagaaaaccttttggcattttccttggcgcttttttctcttcttgttacaggattgcatgcatgctttatgtacatatacagctttgcgtcaaggtctttttccttcatcataaaattattttttagtatatttcctatttttacttagtttcttttcatagattctcagaattgaaactattgagtcaaagagtatatgaagagtttttacacttgtggtgcatgtaaccaaactacctacttgaaggttataccaattgtttactcttcccctctcattagtagaatttgagacctattatctactgcaccccttgccagcctttaatatactcatcttttcagtttttctgtagtactcatgcttttttaaaacgtcattgagatttttcaaacacacataaaaaagaaaaaattagtataataaacttccatttatctatcaccaacttttaataattaacattttgtgtttctcaatgctgacaaattttaaagccgatccataacagcaaaatatttttccccaaaccctattgtaaacatctctaaaatcttatttcttacagagccttattcgataatcatacctaagaaaactaacaataattatttaatatgtaattttcagtctttcctcatcacgtaaaatggcttcttaaccattggtttgtttgacttaagagccaacaagggttaccacttggttgctttatagtgtgcactttggctcgcatcgctcagaaatgtcaggcatgggaattgcacattacccgacaggtagagttgaaaatgaaatatgccatgaaatgacatatttgagaacttctcacagagtatgaacaatgatgtctgccttttgaagcagtaatctaagtacttttgtactttcacttctttcttccaaatatattcattatgttccaaatgtataaagaacctaaagtaggaggtcaaacatcctgtgttagaacatttgcagacttgacacgtggagaagagggtgcatttttatatgaatttgagaaatactaacataaactaagcaaaaggaggaatttttgtaatacagataatgtattggatataaaaatatttccagaattttattttttaatttcgaagcaactctaaaatgcaactgtacattctctcttgacgtcagactttactagcttataataagttgtctatggtatttagttttcactctaacagctatgtactgtaagtttataatctacattgatgccttttctgctgtcatttaggttatttcagacacgcctcactgaaacccatttgccagctcaaggtaaaatcaggctttctaaaatgcctgttgttgtccatttagtcttggatttgtactagtattttcttttctttaaaaaacaaacccggctgggcatggtggctcacacctgtaatcccagcactttgggaggccaagatgggtgcatcacctggggtcaggagttcgagaccagcctggccaacatggtgaaaccccatctctactaaaatacaaaaattagccaggtgtggtggtgggcatctgtagtcctggctactcaggaggctgaggcaggagaattgcttgagcccgggaggcagaggttgcagtgagctgaaatcatgccacttcattccagcccgggcgacagagtgagactccgtctccacaaaaaaaaaaaaaaaaaaaaaaaaaaacccatccaatttttaatgaaaaccaaattgcactctcaggtaacagagaaagcattctgatcatcataatgcccactaaatagccccaaagagcagaggctttgtcttagcattttaaaagctcaaacctgcaaaaaaaaaattgataatttcactgtatttgtaggatttttttttaattcaaaattgaccaaaatacttaatctggactccatctattttgaatggaatcaaatgtgtttaatgcaacttttaaagaaatacagccatttctttttcttagaactaagtatcacatttcagcaataagcattgcctatcctatctggttgtttaaaattattagttaggttttacatttcttttgggtacttcctggcatgttgagttgatcagaaaattgtataatacttattttaaaaacgttttagttgaaatttctgagacagtgtgaatgagttgatttacttcttatgattcctactggaaggatcaggggaatttattatgtgataattttacttacggttttacccttaatttctccgtattttatcctcttttccctcatagctagaacctcagaacctctgcataatgttcaggttttaaatcaaatgataacatcaaaatcaaatccaggaaataacatggcctgcatttctaagaatcaggtaataatgacatttgtagcttgtgtggaaactgggaatggtattgaatggccagcctggctgccttctacatccactttgacatctcatttctttgatctttctcttcatggctctgagctccatgtcagccacctgctcctgtggcaacttcctgggcctgttattctcccacacagctcacctcaaatacaatttgttgtctaacccagaggccctcaccacacggcctcctgtctttactctccccaccagcttttcccttaccaatgtcctttcctctgttctgctggcctctgcataggctctggaaatccctactgggaatggatccacctgggggcttctgagcctggctttcaaaactcagagcctcaaagattgctgcctgttacctcaagtaacagggaggtctcatactcccaggcaatgggtcatactcccaggcaatgggacatgcttccagtgtctgattcactctttatgttttgtgtatctcttatgtttccaggttcactctagcgccaaactatagtgattttagacttcttttcagtctcttcaaacttgggacctcgctacctctagcctctctctcaggaacttcaaaaatactatttcaacagatagcagatgccatcaagtgacatctatcagttttctgccaccaaccaataaatgtaactgcatccttccctgtgagaaaaggtggccttctatctgtgcttgtccttatcctcatcaaggtttttgccctgtggagatctcttctgcctccatggtgtatcaacatgggaaaatgctcaagtctctcttcttccctcagcctcatgtttcccaactatgtttcccatgttaccctccacagtacaactttctttcaaagttcatcaaggacctccttgaagcaaaagccaatggaaacgcctgtgtgcttagggtgtatgtacaggtttcattaatgtaatacattcttagaagtagaatatgcgctcctgactttgacaggtagtgcagcttgtcccaatttacattttacgtcctacacatgcttgccaccctcctgaccacctattgtcctgtctaagctccagacagtagagatgggtcttgattgcagtcacatttcccagacctagctcagagtgtgacatggaggtgtctggcaaatatttgtttagtgaaggaatttgagaactcttgagggcagagtagtacctgaggaaaattttaattaaaaaaaaaattagcagcagttgggaatgtcaatcccataatgttcagacactatactctagctactagactatgaattgaagggaaatcagctatggttcttctctactgctgagtaggactttattaaaaacaaaacaacaaccaaaaaaacctctttctttgattagattaagttacaatagttattgtaaggttgttgatacaaacaatcttttgatattaatcataatttaaaattacataaatctacttgggattaaggtccctcttcccctcaagcattttcatattgttttgtgaagtaatttgggtgaagctttcttctcagataagtgaatgctcatgtttgttttctgttttttagggttcagagctttctggagtgatatcttcagcttgtgataaagagtcaaatatgcaagtataatcagtgcattaatctattattagtttcctttaagtgctcttaggtacattgttgtaaataatgtattttcccccattgtagggaacgaagagtgatcacgatttctaaatcagaatattctgtgcactcatctttggcatccaaagttgatgttgagcaggttgttatgtattgcaaggagaagcttattcgtggggaatcagaattttcctttgaagaattgagagcccagaaatacaatcaacggagaaagcatgagcaatggggtacttgcaatcttgtatttttagttattcttatgtcacataaaaaaatcctcatctctgagtaattacttttttaaagaataattgactatgttgaaagactgcaagaaagtcttcatctcatcctatcagaagcccagaaatcattattaacccattttgcgtttgccccgagaaaactgcgctggcagcaagctgcactttttttttctgaattggaaattgcttaaccactagtgtagcagccaagttagtccaaggactaaattgatgtcttggcagcaaactcatagttgaaagagtactaaattagatatccataccagtgtcatcttagctttagtgaaataaatatttaaaaatttttcagtattatctgtatatagtaattctaaacctctaggtcagttatttgaacctttattccactcaggacttttatactatctaagttatttgggctatagccattctgggcctttcttttctgttcattacttttcatactcggttgacaacagagaagacaagtcagttaacacagaggactcattttgtgctgggcatagatgtgtttttctttcacatgctgtgaccagaagttttaagccagactctttgacttgcctgtggcatgactctgttaaccagttgttggaaatgggactgaccacagcatgcttgaagccctgatcatttagtgcagttcacttctacttagaaagtctctagaaatttttatcttataaaaacaaataaaaatttattttaaaatgatttgcacaatcatgattgtttacaagaacagtcatgtatatgatggctacaaaaatctttactattatactgtgctattattattatttttgatcagcatgtagtttttttttttttttagtaatttacatgtcctaaacatgtagtagccaagctgtgggcaggtaaaaattaaaaggtaatacaagtttcacttctaaaaccaaatatgagaaagactaataaaaaaatcggccccctaaaatataaccctttcctcattttgcatgtattcctatgatgacctggatttaaattttgcatgcaaaccatttctatctttcctaaagtaaatgaagacagacattatatgaaaaggaaagaagcaaatgcttttgaagaacagctattaaaacagaaaatggatgaacttcataagaagttgcatcaggtggtggagacatcccatgaggatctgcccgcttcccaggaaaggtccgaggtatgttgtgctcctcatgacacatcctgtgcccagcagcaggaatggcagtttgatttgttcctttctatgtgctgttttagagttaattctgatgttaatttagctagtaactttctgaaagtctaaaataatttgacatagacgttcacaatgtagagtgagagtggaaagttacaaaacagaatggtagtatgttttacatgtttgtgtatgtgtacatgtctatatattcatgtatttatatatagacctttttctggtttttgtacagtgactattgtgtaatgaaaattggagtatagtactctcaataatttatcatttagatatattttttgtttgccattatttcatcttggaaaagcagagaagtgatgagtgtgttagagccacatatattttcttaaaattagtagtgaatgaaggagattggaaataaactcatttaaactgtataatggttgcttaatctttcatattatatgtttgtctatgacataggatacgatgaagataaaatactttattttcttacatatttggaaagtataaaaatatgtgactagatggttttttaaaatatcacatgaaaggtgtgtatatatgtatatatgaaggagagcattcatttgtatatatgtatgtatgtatgcatacacacacacacacacacacacacacacacacaaacattctttttcttttttttttaatttttagacggggtcttgctctgtcacccatgctagagtgcagtggtatgataactgttcattgtatcctccttagtagctgcaaccacaggcatgtgccaccacacccacctaattttttattttatttttatagagatggggtctcgccatgttgcccagcctggtgtcaaactcctgggctcaagcgatcctcttgcctcagcctcccaaagtgttgtgattacaggtgtgagccaccacgtctggtctgaatgttctcctttattgctaactgctatagtttgtatttttccagacttattgtgtatgaaaacacataaatatgaatacaatagaacgttctacataaataagacttattttctgctttttctacctaacacctctgatagatctttcactgctattgcatagatatctaactaattctacttgcagcatagtcttctgtcataccttataaaagggagtgtatcatgtagaaactgttagaaatcatgctacctttcaagtgtatgtacctaaaatgctgtcagtctgccctctataaacttcggactgtgcactcacattaacagtgtgtaaaaggacttgtttcttgtacacatttggctaacattaactatactaaatcttttcaagcacctgatgtagtttctttaattataggtagatttggacattttttggatacatttcgtggctgtttaacttctttcctttaaattgactgaatggctttgtccatttttctattgagtcatttcattttttttctgatttgtttggatttctttttgtataatttatattttccctggatagttgcaagaaattgttaataaattgttctccctggctcctttcctgtggtatatccctggttcccatgtcgttatctctccttactgtcctcatttcgaaggcacactttctccagtagcttatttaaaaaaaaaaaaaaaaaaggcaacagcagcatgtttgaggggttagtttttgaggtctcttgcatgtctaaaagcatctttattttaccgtcacatttggttgataatttggttgggcacaatgttctaggagggaacttacattccctcagagtttttaaagacactccttcattgttttttggcttgcgctattggtgtggaaaaacccagagtccttctgattgttggttctttgatgtgatgtttgtttttctctagaggggtgtagaatcatttttccctgctgtattgtgacatagtgatgtatctggtatttatcttttcatccattatacttagtgcttaaatgttctagttttgcaattctggggaattttcttgatatatattttcagaggtggatattttttcctcatactctctgttaggctatcctggactggtcatttaattttcttaaatttcaccattttctatctttgtccttttttccccctaattttctttgagattgccttaatttttatggccatcttattaaattctttttttttttttttttttgagatggagtctcactgtctcccaggctggagggcagtggcatggtctcaactcactgcaagctccgcctcccgggttcacgccattctcctgcctcagcctcctgagtagctgggactacaggcgcctgccaccatgcctggctaattttttttgtatttttagtagagacagggtttcaccgtgttaccaggatggtcttgatctcctgacctcgtgatccgcccaccttggccccccaaagtgttgggattacaggcttgagccacagtgcccggccagcatctgcttttaaacagaattttacaatgttcctatcttcacctccaccttcacttccattctgaggtgtagctagcattgtagatttctgaacttgtctagcaattagggacacaccgctcctagcctccttcaacagctatgtgaagtgttagaattccttcactgtcatgttggtgagatttttggagtatatcaagccactgtctttaactagaagcctccctttttcaaacttctctgtatgaatagcatcaggatatattttccaagtagattgcctgttgtctgtaaatcatttattgatctgctcagcctttccccattgatttaaaatatctttaccatgtactaaattttcatatatacaagatccaattctaaaatatctatacctttgctttagtcagtagatctcttcttgatcatttcataggtgtatttactacaactttctttttttttgagacggaatctcccactatcgcccaggctggagtgcagtggtgcaatctccgctcactgcaacctccgcttcctgggttcaagtaattctcctgcctcagcctcctgagcagctgggattacaggcgcccgccaccatgcccagctaattttttctatttttaataaagatgaggtttcactatgttggccaggctgatcgtgaactcctgaccttgtgatccacctacctcggcctccaactttcttatgtgttttggtgtctggtggagaaaatctctggtattgttcagaatatttcttcagaattgaatattatgatgatttttaatctttactaatttggtaggtgagaaaatggtgtaggttatcatttttgctgacgaatgaggatgaggtttttatatttttttccattagtctgtaaaataactattcttgccctagacatttggtagtgtgtgtttgtttgtgttttgaggcaggggctcactctgtcatctaggctggaatgcagtggtgcaatctcagctcactgcagcctcctcctcccaggctcaagtgatcctcccacctcagcttcctgagtagctgggactacagacacatgcttccatgtccagctaatttcttgtatttttttgtagagacagggttttgccatgttgcctagcctggtctcaaactcttgagctcaagcaaaccaccagcctcggtctcccaaagttctgggattgattacaggcttgagccacccatgcctggctggtgtttttcttaacaatttataagcatacttttatatggtgagaaattaactcatctaactttgtaacactaaagcatacaattacagtcttacactgatgtgagtagcaaagcaaagattttaaatttagagcttgttatgcttcctgttgtgagacaggcttttgtggcagttattattgcaatttatatttgtgtttcctattcttcaaagtgaaaacggctatgaaaagtattttatttatttatttttttccctttttcaagccctatctcatataccaatctaagggtattttaatgggaggaaaaccgtaatgagcttttgataacactgatttgtcgaccttttcccaaaattaagtaaagagaaataagataatacttaaatgctgatacaactatagagacttgttatttcagtggttagaaattataagctgctgatggtgtctgtggttcagaagctacaaagcatccattttgtagagtggtctttttgttgttgactgtacatttcagaatgcttgaagaaggagtatggggaaacttcaaggaaaaaggaatccattgaagacagatgccatgctttgagaagatgtaatgcctgattagtagtattctggacttcatggttttgtttttgttgtttgtttgtttaatatgaaaggttaatccagcacgtatggggccaagtgtaggctcccagcaggaactgagagcgccatgtcttccagtaacctatcagcagacaccagtgaacatggaaaagaacccaagagaggcacctcctgttgttcctcctttggcaaatgctatttctgcagctttggtgtccccagccaccagccagagcattgctcctcctgttcctttgaaagcccagacagtaacagactccatgtttgcagtggccagcaaagatgctgggtaagctgaaggtagtcctagagatcacagtgatgtgagtggcacctgtcaccttctttacatgacctgcattatcaggaacagtatgtaaaagatgaatgatgtctgccttttatttttagataggtatgttgttgaaaaagcaagtggcaaaacattgctcccaatcctttaggcttacttattccatgcttcttttagaatatttattttatactttcgtgaattaaaaattttcagtacctgaaagtcaacagtcactttgtaactgaagaatatacagctgttaggctaaaattccctttgctcactggctttgattgaatacctacagggatcataactgtctagacaattacttgacatgtgttctcatattccttctgtcttcccatagagagcagtttgggattaatacacatgattctgtctctcaaaatgtacctctgcactggaagtttttaccccaattttgagggatttttccagatttcagaaattatagttaatgtcatatcactcgtttaagttacatttttacctccagtcattttggctctcttttagctcgtttttatagggatttgtaaaattaaaaatgctttgcatgttttactttataccttaacagggtttattaagggaactccagcaatgttaaatagacatgttagatccactaccccaagtgcacttaaagtgtgatataaatggcttgtgtgtcatttttttctttcttgataaccattacttttaaatgctagaggacattgcactgtggctgctggcttatcacagcaaaggtatcctgcacagctgaggcgcaccagtgcttctccacgtcctgactctggttagctgcctggagccgggctcaactctttaacctctgtaatgaatgggatcatttgaatagtcataggactctaccacatatagagatggttcttatccctgtaatccctgtgtcacacaaatgtttagtacctggtcttttctgtaagaattcttttcctgaaatggaactgaaaggaaaaaaaaaacagtttatttactaacactgtagaccctaagtagttccatctgtattttaacaggcttgtaattattgactgattcttttttctttctactattatttcttgagagtcagttaaaaattctaatagatcaagcatttttttgttttgttttttttttgttttgagatggagtctcgctcttgttgcccaggctggagtgcaatggtgcgatcttggctcactgcaacctctgcctcctgggttcaagtgattctcctgcctcagcctcccaagtagctgggattacaggtgcctgccagcacaccccgctaatgtttttttgtatttttagtagagaaggggtttcaccatattggccaggctggtctcgaacttctgacctcaggtgatcctcccgcctcggcctcccaaagtgctgggattacaggcgtgagccaccaccgcacccagcctagatcaagcattttattctctagtgtgtctcaagagttttctcttccagatgtgtgaataagagtactcatgaattcaagccacagagtggagcagagatcaaagaaggtaatgtttaattataataaatgtgtttctgtccagattcctctgtatcactcagaggtgtattttgtggctgtggtttatgaaggcttcaggccttaatgaacctgagtgttagatttcctattcttagagtataggttatttatccctgaaccatttcaaataaatgtagaaatccacttgttagtctcatcttctttaacattctttggaaatgtaatttgtgaatacatttctagtaaatttctcaggaaattaatccaaaacagagtcatctttagtatgttaggtaggaaaggttatcaaaagtttaattaggagtgttacactgttattcggtactactttgttagaggcatttgcataggagataagtcttataaataataagatgcacaggttgggctttcacttctccgctgtgtgactgggacattttttttctggacagtttggtgaggaggagggctgtttgaaatagctggaggttcattaactgaaccaagacttactgagcctgctctgtaggtgccaggcactgttatacatagttagggatgaagtcatgaacaaaaaatctccacccacacagagggggaaagaaatgtactattggagttatggggttgaaatttcagtcaaggtgatatttgggtaaagggctaaagttagggagctaccatgccattagcttgggcaacttttcagacagagggaatattaagtgctaagccctcaagcaggaaaatctctgatatattctaagcacagcaaagggaccaatgtggggaggtaagcagggagaggaggaaggtgaggcctgaccaaacaggacccaggctgtgcagggccttgtattctatgcctgactgcagtggaatgagatgggaagccaatcttaagatttacattgtgactatgaacttgggatacagtggcactaagggtataatttatgacaaagttgctaatctggtataatccagaccaaccactcaatctctctcagccttcatttccttttctgtaaaaggataattttcacctcatttacttcataggactattataaagataaaaatgaaatatatgaaagcactataatactggaaattcttagtgataatttttaacaatgacaaactgttttaattgtaacttacttaaattgtgtgtcttttaagttattctgatttccctactgataccacattttgtctccatttctttgctagggtgtgaaacacataaggttgccaacacaagttcttttcacacaactccaaacacatcactgggaatggttcaggcaacgccatccaaagtgcagccatcacccaccgtgcacacaaaagaagcattaggtaaagtattttatctgagtgtgtagcacctgatgacaagttaatgaaagctcttttgcaacctgtttacaattattctttttgttctttaaggtttcatcatgaatatgtttcaggctcctacacttcctgatatttctgatgacaaagatgaatggcaatctctagatcaaaatgaagatgcatttgaagcccagtttcaaagtaataactatttaaaagctactaagtgcatagcattataggtggttatcacagaaaatatcaagaattatttaagaggtgaccctgcccttgattagcttgtcacataaaggcagggaatgcatgaaataaaaataagacagttcttgacaaggtactcaatgtgtgtgatagatttgcttgattaaagggaaaaaaaaaaaaagaatagtgctaaagaaggacaaaacccccatggataagaagggctgagtactcaaggtgtgacttgagccttcactggtagaggaatggctggggcagagtattagaggaggctggcagctagcccacatttgtctagagtcaggggattcatgctagaagccagagatcatgataaagataagtagaagccaattagactcaggaggacttgaaatgtaaagctaagagcttaattctttcttgaaggaaatggaaaacgaaaccctgagagcgtttattgagtgagtcaggtgacaatagtactgatttaggagaatgattaacaccttgctgatatgtggcagggactcgtgacctgggacttgagtacaaaaccctgttaccatagttaagtcacttcatctcactatagtgacttactgcctagtatttgaaaagctgatattagttcttttctgtcagctgttagtcctttttcttatttgtagttgaagtttaatataaaggatgttttttcctagtacaataattagatgctattttttattctgttgcagaaaatgtaaggtcatctggggcttggggagtcaataagatcatctcttctttgtcatctgcttttcatgtgtttgaagatggaaacaaagaaaattatgggtaaaaaaataccatctagttaatgggatgctgccgagttttctctgggaccagaggtggtggggtggtgaggagagaatgtgaactgccaatcacatggtcaaatgagccttttgaccacacaaccaggggggtgttgccaaagttctccagatttacagtactgcaggaattcatttttggcttctaaaagttatgtgacagaaatttctgtacttcccaccctcaagtaatgataggtctacttttataagtcatgttaatttgattacactcagttttgctagaactgctataaaagcaaggaatatctatataaagattaactcattaaataggataagtagagaacttttctaatggtcaagtgatagcatttatttccttagcatattttactatttataatttagcaaatctttccttagattaccacagcctaaaaataaacccacaggagccaggacctttggagaacgctctgtcagcagacttccttcaaaaccaaaggtaaacaaacctgttttatctatgaaatgggtcctacaacccatccgctttattctaccaaatgattatgccagtcagaggatattgtgtatgtgaaactatgctaaaaactatgaaacataggaagaatatgtttcttttaggacattatttaataattattcaagaagaaacagggtatgtgcatattttccaagtgtcctaccaaaattatttattaatattcattactgtggtggtttcacatttatccacaaattctttgaatttttttcctccagtttaattcatctccttttgagtgtggctagatttggtgacttgcttcagacaaaaagcaaagggaaagggaaaattagattacagtagggaaacatgggagattctgcctaatcaagtgattgggttaaccaggaataagtcatgttgacagcagatatcccctaatatgatgtaatgagaagaacatttcacctctgatatccttcccaaaaatctgtaaccccagtctaatcatgagaaaacatcaaataagcccaaactgtgtagggacattctacggagtttctgactagtgttcaaaagtgtcagtacaaaaaagactcggaaaggccaatagacaatgacagactcaaggaggctaagaacacttgagaactaaaggtgacatgggatcctggattggatccctgaacagaggaggcacattagtgggaaaaaaaaggtgaaatccaaactacagttaatagtactatttcatttttacaaatgtgccacagttctataagaagttgacattagaggaagcttggtgaggagggtatgtggaaattctgtgctatctttgtaactcttctgtaaatcacaactttttcaaattaaaaaatatatatataatttgaaaacaaaaatgtggctcttgctgtaatgtaactccactgattttccagttctggggaaaagaactgaaccatgatattgtgggctgtattagccaggggttgacatctgtttcttctttaatcctcatttctttggatcttaaagtgttattgaataaggtttcatggactaaagagggagattgctgcttttttttcatttcatcttctgttataggaggaagtgcctcatgctgaagagtttttggatgactcaactgtatggggtattcgctgcaacaaaaccctggcacccagtcctaagagcccaggagacttcacatctgctgcacaacttgcgtctacaccattccacaagcttccagtggagtcagtgcacattttagaagataaaggtgtgtgttacactgttttagtgtctgtcttctgccaactttgattctttcagttttcttcatgaagtttgattcttgtagttttcttcatggaaattccacatgggaactttgaaaatcataaagaagaaacttaaaatctgttcattgtatttttgttcataggtttttttttcctttggcatattgtcttcctaaagtctatgtatttttaaaatataatagcttagattataggtagaatgggagaaaatctatagaagcatttaaaggaaataaggtccaacccatttgtatagatagagcatgtttattttgtttcatagcaaacaaaacagccactacagacattaaattatttgaatgctaaaaataatgaacatttatattttctaatttaataagagtaacagccaattttagtcctagatgtgtgtctacacacatatatgtcaactttattagacatagccaagtacgatagtcagaaagtcttatttttcctacttttagtgatctgactttaagaaagtaatgataaaactcacaagtagtccttatttctaccgtttcaaatctatcaccctatatatttaaaaattcatcatatatctgaattgaatcctaacatatgacattgtcattgagcacagataattgttaactattaagtaccaacctacaaactagacagtcctcttggtatccacagaggattggttccaggaacccctgcagataccaaaatccaggtggatgctcaagttccatagttgaccctgcagaacttgtggatatggaacctgtgaatacagagggctgactgtatactaactatcattgctcacgcttttaaaatatagcaattgtttaccaaagcaataatagaagagctgccaaagaatttcacttcattggatgaaagcatattttaatgtgggttctgagcctatagacctaaacatttttgaccaaggatttcttagagtgctaatccaatataataaatttcttttctgaatcttaaaggagaggtcagttgaaactttgacaattgccaagcaccatcacaagcttgcttttaattaaaaaaaaaaaaaaaaaagattaaagccttttccatccaggaaaagtagtttaatgagtctaaagaatccttcaaaaagtcaatattggctattcttaagagtatttggcactttggctcgataaacaaaaactaatgttctagtgctaaaaagtagtaacacctgttcagtgaaggagtatctgataaaatgtaatccaatatacttggctgtgtgcagtattataatcacttggtagaaatttattctgtatttctgttcttcctagtttacctatctatagatagattttttttttaattatggagagtaataaatattgccaggttgctttctgatttaaacacaaaatcgtttcaataaattaaatgctaatttagtcaatcaactaattgactacaacatgttaaagtgaaaaacccaaaatctctgccctccagaagcattgtagccttttactctccatgttcttgtcttcaggttctcctgaagctgggtgtagccctgccatccgtaccagtaacttcccatggtctggtcatcctgcccacaatggacttgccactctctcgaccccttttttcttgaaggattataggaattagatgtagagttgaaatgctcacatatattagtagtagattttatttgtttgtttgtttttaagagatacggtcttgctatgttgcccaggctgagtgcagtgcagcctcaaactcctgggctcaagtgatcctcctacctcagcctcttgagtagctagggctacaggctcctaccaccacatctggttaattttaaaaagttattttagggatagggtctcactatgttgctcagccttgcctcaaactactggcctcaagtgatcctcccacctcagcctcccaaagcactgggatataggcatgagccactgtgcctggccagtagtggatttttttaaagtgattttttcctcccatttttttaatcttattatacattttacaatggaacactattttgaaatcataatgcaagtcagtgtcaaaagaaatcctagactttgtaaccatatcaaatggtgtgtgttgtgcacacatgtgcatctaacatatcttgtctctaatttttgaatctttcagaaaatgtggtagcaaaacagtgtacccaggcgactttggattcttgtgaggaaaacatggtggtgccttcaagggatggaaaattcaggtattgtgagggtttatttggttctgccattctcttcattttcattctaacattgtttaccattttcattctagctttgccttttaggctgtaatagaatacctaattttagccttaaaggccaataaagattttatggactagtagctttaagtcagaaggtactctccgtgaatatacatacaacagtgaacctaagcacttgatacatcaggccggtgcttgatgagaaaacatcagagaaacccaaattgaaggacattctccagaatacctggccagtactcctcaaaactgtcaaggtcttgggaaactaagaaagactaagaaactgtcacagatgaaagaagagtaaagagacatagcaactaaatgcaacctggtacccaggactagatcctgaagcagaagttccttagtgaaaagagtggtgaaattgaatgatgtctacagtttagttaatagtaatggaacaaatgttggtttattagttttgacaaaggtaccattgtaataggaaaggataatcttagcagaaattgagtgaggagtatacaggaattctctattatctttgcaacatttctttatacctaaaattattacaaagaaagtatagttgaaaaaagtttacaacggaaaaatgtgacaagtgaaaatagcagtgtatgaaattgcatgtataaatttatttgtataaaaatacatacttcagtatgtttaggtagatattgattgggggtgtatgtggagatatatgtgcagtcagttctcattattcactataattctatagagtcaccacaaacactgaattagtgaataccgaatattcttaaggggaatacagacagcatccttcaagcctctaataacaacattttgttaaaaaacaccttatttattatatattgtcaattcattaacattgaatttatgtccagcaacactgacttacatctaaataaagcttatctaatacacatattttcacaggtttctagtgcttaggaacattagagagcacttcagcactatactttgggaccattttcaataccaaaatcaccaagaaaaagcacaaagacacaaaaattgtgacactaagtacagctcgaaaaggatacttgtttgcagtatgagagctggaaccggaaggctgagtgtcaccttgttcaaccttagctcagaacatgtatgttaggtggctcaatttttcatcactctgcgttctgtaaatgactgaaaaatcactatgagtattgatttgaagcttacaaataaattttagcatgcaggtgaattcacaaatatgaaatccattaataataaggatcaactgtatactgtgtgtgtgtgtgtgtgtgtgtgtgtgtatggatgtatatgtatacatatacttccatgtacagtcatgcagttgcttaacaactgggatactttctgagaaatgtgtctttaggcagtttcattgttacatgaacatcagagtgtatttacatgaacttagatggtttgattagtttactacacacctaggctatatggtataacctgtggctcataggctaaaaacatgtacagcatgttattgtattgaatactataggcaatggcaacagagtggtgtaagaatttgtgtatgtaaacatagagaagatatagtaaaaatacagtgtaaaagataaaaaatggtgttctgtatagggcacttcccatgaatggagcttgcaggactgaagttgctctgggtgggtcagtgagtgagtgagtggtgagtgaacgtgagggcctaggacattactgtgcactgctgtagacttcagaaacactatagttaggttacactaaacttataagaaaaatttttcttcagtaataaattagccttagcttactgtgagctttttactttataaacttaaaaagttttatctttttgacttttgtaacaacacttagcttaaaaaacaaacacattgtacaactatacaaaaatattttttctttatatcattctataagcattaaaaaaattttttttttcactttttaaacttttttgttaaaaacgaccacacaaacatacacattagctgaggcctacacacccagggtcaggatcatcagacatcactaggagactggaggttttcggctccattatgatcctatggggccaccattgcatatgctgtcctctgaattgttgttatgcagcacatgactatatatatggaagtgtactggagtgttgtattgtgattgacattttctgtttgtttcaatgttataaaagcagccatttttggaataaagttaaatattcagtcttgatgatagtagtgtcgcatagatgcagcttggagaaataaacccactcctgacatttcctactaaagaatatcccatgtattacctcacctatttatctaatataaccatatcttgattttattatttctgttcatattgtactagctgtatattttcatagatttgtttgtctaaaaatgctttaatcaacttttagtctgtgaggctattgtgaaatgtcatttctagaatgagaagggaatttcatgtgactgaatccaacagatttctaatcatgtggtgttttggtttctttattcctttcacacgtccagtccaattcaagagaaaagcccaaaacaggccttgtcgtctcacatgtattcagcatccttacttcgtctgagccagcctgctgcaggtggggtacttacctgtgaggcagagttgggcgttgaggcttgcagactcacagacactgacgctgccattgcagaagatccaccagatgctattgctgggctccaagcagaatggatgcagatgagttcacttgggactgttgatgctccaagtacgaacactcactctttgttatgcccttgaatcaggacaggagcatggggaaagctgtcccatgaaagaaacccacagtgggacttgaatgtcactgagtagaacagatgtcagtgagttcagatgaaacttgcataatgcatcacaatggagtaacagtagcatacttgaagggcaaatcaattttaattttagaaggtatcaaaataactactgttggaagagggaattagaatttgacagcctactacgtgccaggcttttaatctaatactattatattttacattttacagaagtaaactgaggctgaaggttaaagagacacccccccccgcccacccccttgttacacataaacagtctggcatagtggttaagagcacagagtctggagatggactgactatgttctaatcctagctccctcacctaagtagtcacgtgatcttgaccaagatcatttcaattttccatatccctcttttctgtagagttgagctgatgctagtacctaccttagaggcttattgtaagaaccaagtaaattaataaagcactgagaacagtgttctgcatgtgcttagcgctgagtgagtgttaaccatgttggattagtatttgataactgccactaatataattttttgtaacattccaggttggagagaaagctttttcttacttttagaaattatttctcttttgtggacccaaagtatatctcatatatgcaaattgcacataggtagtataagttttgtggatataagtggaaaagaaattaaataatatgtgtctatctgcgcacattagaagtaactaatgtccacatctgcccttaagacatgtatccctaattgtgttaaagatagaatctagccgttccagttgagtggagcaaatgcacctagagttgattccctttgtcacaactaaatattgatccaaatttgtagatctaaaatggcaaataataaactgtgcagagctaccaattttgacttttaaaaatagttcttttttattttgaattaatactcttataaggctttgaaagcttacttagtaaatatctctactcactttgtctataatttatttggtaaagttcttgagtactcaattcatgttccctttttttttttttttctcattcctttaagacttcattgttgggaacccatgggatgataagctgattttcaaacttttatctgggctttctaaaccagtgagttcctatccaaatacttttgaatggcaatgtaaacttccagccatcaagcccaagactgaatttcaattgggtaagaattatttggataatataactttaaattcttgtttctctatgagaagttgatggtaacgtgtgtgtgtgtgtgtgtgtgtgattctcctatttgccccccaacctccaatagggagttgtatctgtaatactaaactgatcattttgttaagccatgattgtaggattgtgcttgctgttgggactataactcctataactcatagagggcaatttgccaatatctattaaaattaaaaatgcatttacttttaaagccagctatccacttttaaggatttcctatagatattattatatacttctatagtaaaatactatagtaacattggcaacagaacaagaaagctcactctgtactgatagggaatgagctccaaaacataccatactgttaaaagggcagagccgtatgtattatatgccacaattaaaacagttagctgtaggtgggagtgggaaacaatggtagcaagacttcacaatattcccttttaagttttttaatgaatagactttatttttaagagaagttttaagcttacagaaaaattcagcataaagtacatattcctacctccccatatatacacacacagattttcgtgttactaacatcttgcatgagtgtggtacatttgttaaaattaagccaatgttgatgcattattaattgaagtgctagtttacattagggttcactctttgggttgtatatcctgtggggttttttacgaatgtagtacagtgacatgtatccatcattacagtatcatacagaatcatttcctcaccctaaaaatcccctgtgcctcacctattcatcccttcctccttgtcccccaacgcctggcaaccactgattgttttgctgtctgtgtagttttgccttttccataatgtcatatagttggaatcatatagtatatagccttttcaactggcatcttttacttagcaatatgcatttaaggttcccttgtgtcatttcatgatttgatagcttttttttttttatcactgaataatgtttagtgcatgaatgtaccacaccgttaaacctttccactcatctaatgaaagagatcttggttacttccaagttttggcaattatgaataaagttgctgtaaacatctgtgtgcaagtttttgtgtggacataagttttcaactcataatttgggtaaataccaaggagtgtaattgcagggttatatgatgagagtatgtttacttttgtaagaaacttccaaagtgactgtaccatttagcattcccaccaacagtgaataagaattcctgttccccagtcttgccctcattaggtggttgtcagcgttttgggttttagccattctgatacgtgaacagtgatatctcaatcttgtttgaagtttcaattacctgaagacatactgtgttgaatattttttcatatgcttatttgccatcagtatatcttcagtgagatgtctatccagatcttttgtccattttctaattggttggttggtttcttatcattgccttgttcctgatcttagggggaaagcatctacatagtttattacctataagtatgattttagctgtaggttttttgtaaatgttctttgtcaagttaagaaagtatctctctattcctagtttgctgagagggttttttttttaatcataagtgggtgttggattttatttatcgtgctcctttcaatattttctgcatttattgatatgattatatgattctttgttgatgtgatggatttcattaattgaaattaattaattaagtgttgaactagccttgtatacctgggataaattgcacttggttgttatagtgtataattctttttctacattgttggattggatttacttataattctttttacacattgttggattggatttactaatattttgctgaagatgtttgtatccgtgttcatgagaggtactggtctatagttttcctttcttgtaatatctttatctggtcttggtgtcagggaaatgctggccccttagagccccttaggatgagataggaagtattccctctgcttctttcatctgcgagagattgttgagaatggatataatttgttcctcaaatgtttgacagaattcactagtgaacccatctgagcctagtgcttcccgttttggaaggttatcaattactgattccatttctttaacagatataggactgttcagattatctatttctcttttgtgggctttggtagattgcgtctttcaaggaatttgttcatttcatctcaattctcatttgtggatatggcattccactattgatttctactgtaatgtttatttcttttattctgcttactttagttttaatttgctcttttttctagtttcttaaggtagaatctcattgatttttagatcttcttttctaatatatgtatttagtgctacaaattttcctttactgcgtcccacaaattttggtaaattgtatttccattttcatttggttcaaaatatttttaaatttctcttgagacttctttgaccaatgtggtattcagaagtatgtttaatctccaagtatttgggggactttacctttcatactgtgtatgatttctgttcttttaaatttggtaaaatgttttatggcccagaatgttgtctattttggtgaatattccatgtgagcttgagaagaatgtatattctgctgttattcgatgaagtattccataaatgtcaattagatccaattgattgatgctaccattcagttcaaccatgtttttactgctgatttcctgcctgctttatctgccccttcccgtccctccctgtcccgcccctcccctcccctccccttcttttctttctgtgttgaaacagggtatcactctgtcatccagactagggtgcagtggcacaatcttggctcactgcaacctcaaaatcctggattcaagcaatcctttggccccagcttcctgagtagttaggactacagtcatgcaccacaacatgcagcttttttttttttttttttttttgggtagagatagggttctcgctatgttgcccaggtctcgaacttctgacctcaatccatctttctgtcttggcctcccaaagtgctgggattacaggtgtgagccaccacacccagttgatctgtccatttctgatggaagggtgttgaagtctccaactataatagtgaattcatctttttctccttgtagttgtattagttttcggtaacttttgactcacatattttgacactctcttgttaggcttatacacattatgtcttcttggagaattaatccctttaacattatataatgcaggccaggcacagttactcacacctgtaatccagcactttgggagccaaggcaataggatcagctgaggccaggagtttgagacaagtctggacaatgcattgaggccttgtctctacaaatatttttttaaaaaaattaaccaggcatggcaacacgtgcctgtaagtcccagctacttgggaggctgaggctggaggatcacttatgcagaggagttcagattagccagggaacatagcaagaccttgtcttacacacacacacacacacacacacacatacacgtaacgccattttctatgctgataattgttttgctctgaagtctgctctgtcagaaatgaatatagctattattacattttcttttattagtgttagcatggtatgtctttttctatccctttacttttttttttttttgagaaggagtctcgctctatcacccaggctggagtgtagtgccgtagtactatgatcttggctcattgccacctccgcctcccaggttcaagtgattttcctgtctcagcctcctgagtagctgggactacaggcgcacaccaccacgcccagctaatttttgtattttttttggagacagggtttcaccatattggtcaggctggtctcaaactcctgacctcaggtgatccgccttccttggcctcccaaagtgctgagattacaagtgtgagccaccgcacctgggcttatccctttacttttcatctgtcttggtatttaaagtatgtctttgttttgattggtatatttagaccactgatatttaaagtgattattgatataattggattgtcactatatttgttttctactccttgcccttgttctttctttgtctgctattctctttcttccttctctgattttgagttctttcataattccattttgtctcctctcagtgtattaattatacttcttttaaaatttttttaagtggttaacctagtgtttgcaatatacatcacaactaatcttttttgcttgtgtaagaaaatttttattcttcacatttgaaggataattttactggatacagaattctagattggtggattccaaatttctaagtactttagatatttcactccactctcttcttgcttgcatggtttctgagaagtcctgtgtaattcttatctttgctcctctataggtaagatggttttgtcttgcttctttgaatattttctctgtgtctttttctgcagtttgaatatgatatgcctagatgttgatttttcagtatttatcctgcttggtgctctctaagcttcctggatctgtggtttggtgtctatcattaattttggaaaattctctgctattattacttcaattttttttttttttttttttgagacggggttttgctcttttttgcccaggctacagtgcagtggcacaatcttggtgcactgcaacctccgcctccagggtttaagcaattctactgcctcagcttcccgagtagctgggactacagatgcccaccaccatacccggctaattttttgtattttttgtagagatggggtttcatcatgttggccttgaactcctgacctcaagtgatccgcccatcatggcctcccaaagtgctgggattacaggtgtgagccgctgcacccggcctcagatatttttgtctgttcctttctcccttcttccttctggtattcccattctacatctgttatacattttgtagttgtcccacattccttaaatactctattctatctatttctttctatttttttttttttttttttttttgcatttcagttttggaagtttttattggcctatcttcaagctcactgattcttttccctgccatgtatagtctattggtgagtcaatcaaaggcattctttatttctgttacagtgggtttttatttctagcacctttttttgcttctcagtttctctctgcctgtattacccatttcttcttgcacactgtctacctttttcattagaacccttagcatgtcaattagaattaaaaaaaaaatttctagtgtgggcctggcatggtagctcattcctataatcccaccactttgggaggctgaggtaggatgatcacttgagcccaggagtttgaggctgtagtgagctatgttcatgctactgcactctagcctgggtgacagagtgagaacctatctctaaaaacacaaacaacaaaatcctagtctgataattctaaaatctctgccatatgtgtgtctgtttctgatgcttactctggctcttcaggctgtgatttttgtcttttactatgccttgtgagtttttgttaagagccagacctaatatatgagctaaaaggaaatgggattaaatagacctttagtgtgagctttcatgcttaatctgcctatgggttaggctgtgtttactgtttgctgtcactacataagaggctataattgccctatgtgtccttatttttttgtttcccctgttatctttgggtttccctacggactttttaaataaggtctcagatgtgcagttctttacattataactcccccagtactggttccagcagtggtttctgttcctgggcttctagtttggcaagctgtgattctctgcgtccacttgtctgtctctaattttggaggaagcagattgtcctttgacctcagttctctaatggatctcagaagcgtcgttgattttcagccatttggcttactgtgagggtggagtgatgactccaagctcctcatatgctggaccaggaaccagaaatctactactttacatctgattttgaacatgtgaattcttgtttttaatttaatttaaaaatctactagtacagtctaggtgtgttagctcactcctgtaatcccaacactttgggaggccaaggcaggaggatcacttgaagccaggaatttgagacaagcctgggcaacatggtaagaccccatctctacaaaaaatttaagaattagctgggcatggtggtgcacgcctgtggtcctggcttctcaggagcctgaggtgggaggatcacttgggcccaggaggtcaaagctggagtgagctattaccttgccacagcaacccagactgggcaacagcaagaccctgtctctaaagaacaaacaaaaaactactacaacttcacctctgtggtcttccccccaaaatccaataactccaaagtaaccacaagaaatgtatcaaacaaacccaatttgagggccattctacaacatacctgactagtactctttggaactgtcaaggtcatcaaaaacaaggaacatctgagaaactgtcacagtccagaagtggctaagtggacatgatgactaaacataaagtatcctagaacacaggcaaaaactagtgaaagtgagtaagatgtagagcttagttaataggagcatactactttggttgattgattatttgtgacaaatataccatggttatgtaagagttaacaactgcagacagtggatgcgaagtatacagaaaactctatgtctttgtaacttctttgtaaattgaaaactatttaaaataaaaggcgtacataaattaaaattttcaattatcttctaaggttctaagctggtctatgtccatcaccttcttggagaaggagcctttgcccaggtgtacgaagctacccagggagatctgaatgatgctaaaaataaacagaaatttgttttaaaggtaaatgacctgagttgtcttttgtatgatatagaaatgaattttagaacttgagtttgccaagaaattttttttctttaagatagtggtgtttttatttatatctacagttggcaattaaaaaacaaaaactacaaaagatttagaatttttttcccactaaaattgtcttggagcaagccccacattgcagcaacagttcatagcttgtcatcactatcaacaccacatcttttattgggatagaggttgctttattgctatcatttttcagaatacgagattggatatgaatttcacatacctgatttgcaggtccaaaagcctgccaacccctgggaattctacattgggacccagttgatggaaagactaaagccatctatgcagcacatgtttatgaagttctattctgcccacttattccagaatggcagtgtattagtaggagagctctacagctatggaacattattagtaagtattcatttttatgatgagcacatgaatttaaaatggatttttggcttgtaccttgcacgtacttttgtggttggggcttttgtggagtggtgggcaggggcaaagctctcaatttgaaattttattaatcttgtgcaactaactcaggattccactttccattgttcctagaatgccattaacctctataaaaatacccctgaaaaagtgatgcctcaaggtcttgtcatctcttttgctatgagaatgctttacatgattgagcaagtgcatgactgtgaaatcattcatggagacattaaaccagacaatttcatacttggaaacgggcaagtgttatgcttttaacagggttcttctcttcctatttccatagcagcctttcatcatttgtgctcatgcagcctggctttgtttgtgtttaatatagatttttggaacaggatgatgaagatgatttatctgctggcttggcactgattgacctgggtcagagtatagatatgaaactttttccaaaaggaactatattcacagcaaagtgtgaaacatctggttttcagtgtgttgagatgctcagcaacaaaccatggaactaccaggtataaaactaaagtgagggacttggaaatatttttctgtgttgcgcttatcagattttcaaaatgaatttggggatctaggtagtttgaggtggtcttttgaggagcagttgaaggagagatgagcctaaggccaacatggcagggatagaattctattcctgaagaatactctgctttcttattagtccattatagatcctgttatcaggaaaggggggcagatatattctgtgagtttgatcatagggaagagtatttaatgattagtgaacccttcagaaaggaagtcatgcagcaaagagacagcttggtttattgagatcaaggtaggccagcccaatttcctaaatcagggataacagggagacctgcatgcccactccaggcagagttgagcacatgttggatatacctgggatgctctcaggcaggatggtgggtttgactgtaatagatggtacagccagattcctaactggccagatcaagaaatggatcattattattctaatggaagactgctgaattttcaaccaactagaatattaggtgaccagggaggagaatgctaattgggataaatgaaatattttgaacctgggtttaacaaaaccaactgccaagttccctggtgagagctatgtctttccaggagcccatggtaaaaggggcaaagatttggtgggggtggggaggggtcttgtttctggtatgttgtcactgctagtgaggccttaggagatggtcatcttctatcctgtggatgtggatggggctggagtgttcttttcaattatgaacatatcacacaacaagaggccatgggggcgagttagagaactacgaccagagtcccaggggagtgagctgggaggacttccaagctgtctatgtggaagagggcttagagtgttgtgtttgtcctctgtgtgacagaatgaaggacttgagagggacatggtagctcaggagggcagagcttttcaagagactggaagcctgtggcaaagcctagatattcagtaagacatgttagtggggcgattgaacaaatgccttccaaaatgttttaaaagtaaaatcctgtgagtatttaacttgctgcctaagttagacaggcatcttgatatagtcatgtgtaaattactatttaagtcatatatacctctatcttcttcatagatcgattactttggggttgctgcaacagtatattgcatgctctttggcacttacatgaaagtgaaaaatgaaggaggagagtgtaagcctgaaggtctttttagaaggtgagtattagcattggtgctgtagtgaaaagagaataactaaagtagaatgttgggttccatctggcaaaaaaaaaaaaaggatctctgccaccgcatggaaatcctatgccttgggcaatatggtgacaggacagtcctgggcactgggcacagggagcaagctgcatagctttaccacttctctctccccactggggcagctgatgtcctcactgaaagctcctggccaaatggttgacatcctgtacacacgcaaatgtttccacccctaatcacctaatgtcactggacctcaggttctcactggttttttcttttttcttttttttcttttttttttttttggtctatggaaatactgatcctatttttgtcagatatttgtaagaagcgaaggaaatagtgtatgtgaaagtgcttcataaattataaagtaatatgaatagctctctctcacaggacagtcctagccctgtgtttcttgggcttctcaaagatttttttttatctataaatcacagtgaaaattcatgattaggcaagagctcttcctgtcaacatggatggctctcctaacacaatgtgtgaacaaactgttggaatgttttgtttaagctgagtatttggtacctgcatattcattatatcacttatactttcttttttgaggcataaaaacatgcagaaaagtacactcatcttaagtgtacagcctaatggacttttacatatgtttatatcttcttgagaaaacgtaagagtaggaacctcatctgtgaacctcatctcccccagcccccacaaaaaaaaaagaaaaatggcaataattttatgaaatgtcatatactgtacataagtaaggttaggttcaggccctggaggaaagcttataacaactattctttattctgcataatgagccctcatgtttagtaaatactttattccatctttggctcaaaattgaaggaacagatagtttcatctctgaccaccagtgtgaagaagagctggaagttaaccctcagcaggcctgatggcatttcctatgtggagcacaattcctttgcattctactttctctccaacaccttatctccatgttctggagtttctgcagttaattttaacaattatagtagttggaactcttaactcttgagctctctcctgggcagtccaacctgtctacttggtcctggtgcatatgcagttaggcttgacagaagcatttgtccagattatccaattctagcagtattgtatgtatggctagccagaagcagatagtttgggtttttatttaaagggagagagagaaaattttttgacttgcagtattgctaaaagattacttatcttattttttggaacaagatgtataagacagttaattgggtctttaatctctctcatgtataatagatatagtgtttccatacttgctgcattgtattgtgtttaggtgagagttgttatactaaactgtccaagcctgtggaagtcagatgcaggggtggggttatcctgcatattgaaggctacattttagccattatttatgctttgtctttttcaggcttcctcatttggatatgtggaatgaattttttcatgttatgttgaatattccagattgtcatcatcttccatctttggatttgttaaggcaaaagctgaagaaagtatttcaacaacactatactaacaagattagggccctacgtaataggctaattgtactgctcttagaatgtaagcgttcacgaaaataaaatttggatatagacagtccttaaaaatcacactgtaaatatgaatctgctcactttaaacctgtttttttttcatttattgtttatgtaaatgtttgttaaaaataaatcccatggaatatttccatgtaacttagttgttataaatatttcaacaaaatatacaaccccataaggtccctatatagcaggctgattgggctgcttctgggatgcaagcatttgtgagaataattcagacatgagcattctctagaaatcactttttaaacactgacctgtttaagccaaaaaagggccaagacagctattttccaaatttgaagtttggtgtctgtgtaaacacacacacacacacacacacacacacacacacacttccctaacatttccaagggacttcaagtttttatgaataaagcttgcctgtcctttattgtacctgttcttcattgctctctacgaagtacaaatcctaagcctgtttattttttaaaagtaccaaaggaaaatctctgatcttaaagtctttcttataagctatatagatcattaactaaccatctctaaaattatagcagacaacttggcatttgttgactttcagagctggaagggccttctagcctggactgaccttccttcctccatccctccttcccttgttcccttagcattacaatgaaaacaaatcccaggttatgcacagttcaggacagagtgaattgcttcctcctaccattatcagccatcgtgttgcccattccagaggcaatcacaccccattttttatgaatctttccaaaaagaatgtaatgcatatttctatatactgtatttttgaagcaactagcataattctgctt

SEQ ID NO: 22 - DNA, 24149 bp, Homo sapiens
ccatctggatgcagaggcgaactaaggactgggtgggaatggaagcgaggcccttcgagaagaggaaggggtgcaggccaagccgggcaacttaggaaacgcaaagtagaggcgcatgccaccttgctaactctcgactcttccagtctcgccccagtcgtttctgtggttttctctaaatgccccagccgaccgcaccagctactctccccgtgtcccagtaccagctggtccggttctcttggtatcccgctctctcctggaaaaatggaggcgcgaatcctgcccaatctaccgctccgagcgcacgttcactgcgcacgctgaaagggcgccaagccgaccgctgcgctatcgatcggtcccactctctcttgcttttctcgccatcttacttactggcacgttcaaaggttagttcacctccttggactttatctccaatgcgtcaagcttgacgtcaaggggctgttgcttcaccgataaatggccgaccgcggagagcaccctggggctgggactgccacaggtctggctggccgttggctccaccacttccgggttcttagggagcaagtgcgcctgcgcgcggtgtgcgcccttaaacgcgactcaaggcgtcgggtttgttgtcaaccaatcacaaggcagcctcgctcgagcgcaggccaatcggctttctagctagagggtttaactcctatttaaaaagaagaacctttgaattctaacggctgagctcttggaagacttgggtccttgggtcgcaggtgggagccgacgggtgggtagaccgtgggggatatctcagtggcggacgaggacggcggggacaaggggcggctggtcggagtggcggagcgtcaagtcccctgtcggttcctccgtccctgagtgtccttggcgctgccttgtgcccgcccagcgcctttgcatccgctcctgggcaccgaggcgccctgtaggatactgcttgttacttattacagctagaggtacaaggggtttgttgagtggtgttgacatgcgcgggaggggtgggtgggcttcagattggattttgtcctccgagatcacctgggtaagaaaagcacagaaggtctctgctgtgttggagttcacgttctagtgggtggggagacagacggtaagcgtacggagaacttgcagctggggtgggtgttacagaggaaaagcaggagtgcggtttaacgggggccgctttagatagaatagcctaagaaggcccttgtcctggctggatgagtgggtgaattgatgaatgagaacctccttgcagaggccttcccggtccgtacttctcagaccgtagaccttggagcagttgtaccgggataacttgcagtgcttgttaaacatatagctccaccgagagcccggtaaatcagaatctctgaggggtaggacccaggtgtctagttattaacaaactctccagatgattcttaggtttcattgagaactagggatgcagaccggtgcatacaaatcgtctggggacgttaaaatgcagaatctgtttttttagacctggggttaggcctcagagtctccatttctaagaaccatccggctgaggtagacgtagccactgtccttaactctcgtaatgtctcttcctcttccgtaaccttccttgtcccttgaattaaacgtttttcagcaacctactcagttcgtccttcccttcatctctgcagacatgcacaggtctgagggaggaaggaataaaccgtataaacctcctgcgctattagcctaacagcttttctattcaaaatagtaggacttctggtttgaactgaatggatcctgtgaaagtcatctggttcttcaatctggttgcagattagagtcacctgaagggcagtctccttggcgttgtctccagaattctggattagaatcttattccattctgcttgttattcaatttccctagaaagaaaggtagaataaattggagcaaatgcctgtagcttctgtcagaagaatgttgaataaatgttgttaggcctatgtgatctcattagactgctacttagaattgtaagggaagtaaagcattagagcatgtgtgaaattaaatatttgattaacacaagtgtgcatttccttgttgctgtttatcaacttttacttacccactgtttttttataagggctgcagcctgtagtctgggcctggcttcatcatggaattatttgcttaattgtaaaatggtaatcttaatttttttttttgagacagggtctcactccattgcccaggccagagtgcggggatatttgataagaaacttcagtgaaggccgggcgcggtggctcatgcccgtaatcccagcattttcggaggccgaggtgggtggatcacctgaggtcgggagttccagaccagccctaccaacatagagaaaccctgtctctactaaaaatacaaaatcagctgggcgtggtggtgcatgtctgtaatcccagctactctggaggctgaggcaggagaattgcttgaacccaggaggtggaggttgcgggtgagccgagattgcgccattgcactccagcctgggcaacaagagcaaactctatctcaaaaaaaaaaaaaaagaaacctcagtgaaatgaaagactgaactacacacctgggggaaaagcgtaataaagggagcaagaagtgcaaatgcttatggcaggggacttatttgcagaaagaaagccttgtgtggctggtacacggttgacaagaagaggagatgaagtcagagaggtagttagggtccatgttctgtgagacttcaataggcctgtctatgcaggttaggagtttgcattgttttgattgagttgggagccatgggggtcttctgaactgaggatcaacacatctgatttgttaatgagattgccggcctcagtgttaagaatggaccatgacagggtaagggtggaagtggggaggccattgggaggctgttggaaaaaactcaagggagagagaataatggtttgaccaggtggtagtagtagaggtggtgagcagtgatcttgaaggcagagcctacagaatatgctggtggattaaatgaagggtttgcgagagagaacctcgtaaagggttattatgccaaggcttttggcctgagcaactgacaggatgggtttgccatgcactgagatgaggatgtctagagactagatttggggaggtgagagtggggagagattaggacttctgtttgggacatgttagaatggagatgccgctcagataatcaggtgcagatgttgcatagaaagtagaaaatgtagatcaagagttcaggggagaggtctgggctgaagaatgaatatttgggagtcctcagcctgtagatggtactgaaagcaaagagactggatgtactcggctagggagtaattggagatggagaagtcattctaggcctgagctcagggcacacccatgaacagggaggtgagaagtggagaagggaagaggttcagttttggatatgttaggattgaggtgcctggcagacatttttgggagatcctgggcaaatccttggatatccaagtctgacagtccaaggagagactagggcagaagacgcactttgagtggtcctcatgaaggcatttagagctgaggcactgggtgatatggatccctggtgaaggtgtagatggagaagtggagggtccagggactcgttcttgagtcaccccagacccttgatctggcaaaaatgagactgacccagcaaggagggaaagacaggacgactaggtggtagataaacctggaagtgaagtgaagaaaaaagtgtaagatgtgatcaaccttgtcagattctgctgaggatgcaagtacggggaaggtggaattgacccttgggtttggcagcagtaggtgtcagccatgagcctgacaatgtggtggagacaaaaaagccaggtggggatgggctcaggggaggggagaggagcagtagaggtggcaagtgtggacggttcttctggagctttgctgttggagaggagggggtcattgttagcaacgataatagaataaagaggacttttattttattttattgttttgagacgaagtctcgctcttttcccataggctggagtgcaatggtgtgatctcagctcactgcaacctctgcttcctgggtttaagtgattctcctgcctcagcctcccgagtagctgggattacaggtgactgccaccacgctcagctaagttttgtatttttagtagagacggggtttcaccatgttggccaggctggtctcgaactcttgacctcaggtgatccgcccacctcggcctcccaaaatgctgggattacaggtgtaagccaccatgcccggcctaaagaggacttttttaaggtagcaggtatgccagtaggctgcacagggatggaagtgatccattagaggagagatgatggagcagcaagaccatcaggagtgaagactccgtgacagaggatgggacgcagtgcccaaggggaggttggccttgcagggaaagcacatgcctgtccctccctcattagcttcatttggacaaaacatgtaaaatccggtgtgttgtggaggccttttgattggggaactgtaacgctgcctatcgagcaacagcactttaagcaggtggctttgttcaaattaaaggttcttctttttcttttcaggcatcatggaccgatctaaagaaaactgcatttcaggacctgttaaggtaaattgaataatctgtaatctcattcacatttataaacccacatggaggttggtcttgtcgggaattctttccgcctttactttggatttaaatttagatcccttactgtgatcctggatatgaattagtcacttttctcgtgttcagtaacattttgctgcttcttagagtagcttttttgttctgctttgtcttataatcggctgcttaagtttctatatccctccactgtatgcaggataatagtaataatgcatctggcaggagttcaaaacttttaaaattggccataaatataaaataattagaaaaaggctaccttgaattactgtatttgattctaagttcctatgataacggccatttaaaaaattgctctatatttaaaatgtttctttttatttgtctttgtctgaatgcctgctgcgttgtggacagtgtgctaatttcaggagtaactgactttgtatttggaagtcttaacaccctctctttgtagagcactcataccgttgagctggggatggactttgaggctttcatttctagcacttgtccctcacttacaatgagctgttgaagctgaaggaaatctcatccctcctaccccttttagtttgattagctgagggtgttagagttaacttaacaatttaaggttgtaatacagtacttacaggcgtataaataatacatttcaaggctgggcgcggtggctcacgcctgtaatcccagcactttgggagaccaaggagagtggatcacaaggtcaggagttcaagaccggcctggccaagatggtgaaaccctgtttctactaaaaatacaaaaaattagccaggcgtggtggcaggcgcctgtcgtcccagctgcttgggaggctgaggcagagaattgcttgaacctgggaggcagaggttgcagtgagccgagatcatgccactgcactccagtctgggtgacagagcaagactccatctcaaaaataataataataatacattttagtagtaactttgtgaagtgtctacatttgtttcctctttgtcagttttttgctcaattccattttgtcaatacttggaaaatgaaacattggttaatcaatagtacagtaataagcttattgtggaaaatcttcgatatatgaaaacttagactcttctaaaacttcatgaagataataccactgttgaacgttttgacgtatttttttttggtctttttcttaaacgtatattatcaaagaaatttcaatggaactgagattttggcataaagtttttgtatcatagctttttgccaaatagcaatgtagtgtctatttccaaattattgagaaattttagaaagtgtctccttcattaatggatatttgttaataaagcatgatttttaggggtgaggaattggaggggatagaaggtatcattcaggtattcttagccacatactaactatcctctggaggtactgattaaaataccttttcaccttccatctcttatcagtgacattcattattttgctatactagagaacaaactttgtgaaattctcaatatattcatcttttgctttcatgaatgccagaaagtttattttctcttccattctaggctacagctccagttggaggtccaaaacgtgttctcgtgactcagcaatttccttgtcagaatccattacctgtaaatagtggccaggctcagcgggtcttgtgtccttcaaattcttcccagcgcattcctttgcaagcacaaaagcttgtctccagtcacaagccggttcagaatcagaagcagaagcaattgcaggcaaccagtgtacctcatcctgtctccaggccactgaataacacccaaaagagcaagcagcccctgccatcggcacctggtaaactagcttttgagactcattggatagtccttctttgtcgtcgttgctaaaaaagccagtgtatatacttgcacttattgtttggagccttagcttttatatctgttgaggatggggagaaaatatggtgtctgggttgaagtaacagtgtctgcccatgggccagacctatgctaaaaatacagacctgattctcaccctcttggaagagttgggcacccagggaggacacagcataaattggtgtccttttgattgcttgttactgagtctggatgtagggtgcttgcagtaagtgacttgaagggactgagatctaaagtgtgggggaaatccagagaagtgggtgaactgaggcaggctgcggtgaggtcaccatgggcattgctggccatgttaaggaatggggcctcatctctagggcatttggaagctactgaagcttttttgaactcagaagggaactctgccttttagaaagtttactgtggaaggccaggcgcagtggctcacgcctgtaatcccagcgctttgggagaccgaggcaggtggatcacctgaggtcaggagttggagaccagtctgaccaacatggagaaaccctgtctctactaaaaatacaaaattagccaggcgtggtggtgcacgcctgtaatcccagctactcaggaggctgaggcaggagaatggcttgaacccaggaggtggaggttgtggtgagccgagattgtgccattgcattctagcctgggcaacaagagcaaaattctatctcaaaaaaaaaaaaaaaatttactgtggaagtactgaataaattggagtagaacgctggatttaggagtaccagacaggaaggaggttgaggtcagagatggcaataacctgctctgtgtggagcagagtggatgcaattatttaccaactgttgagtgctcattccctgcaggctctgagataagtgcgtgcttcatccacgtcatctctttcaatcttcgtaaccacttcatgaaggtagccagttattaactcagttttacagaggaggaagctaagactcagaagcagttaacttatccaaagacaagccaggatggagaggtgcacacaaatttgagagctcatttacgatgcagactcattagaactgggcaataaattgtacctgaaagatgaataaagaggagttagggatggtgattagattgatattaattgagtgagtgtcctgggggttgaggggtgcacatgtgacaggggcatctggaggaagagtttggaccagcatccagatatctgagcagagcattgtgtgctgttcgagtttgctatgttggagacagaccagtggaaatgtttcatatgtccttgtggctgatgaaatagttaccccagtcctctgctgcacaactgttcattgtgcattttgctgaattggtggcttttatttttatatttccccttggcagctaatataaatggagggtggctggcttatgttttgctacatgttggtgataattcgtatgtagggtatggactgttggctggcccacctagtaaggggaaaaaggtgacgagttggcagctcgtcatgcatgggaagattggtacttctgccacaaaagctcttctttggaaactgaggcttcagaagagcctgcatagtctgcctttaatttatcagagaagggcctgtctatatatacgtctgctcatctttagaaattctataaaggcttcacatgatggaagtcagggtgtagtagtcctttttttctataaggaaaactttaaaaaaaaaaaacagatttatcattcttgacataccattaatattttggtgaccaattctttgattcacctctattcacagcttagcttatcctatatagttattctaaaaacaggtttttaacttattccatatagaaaataatcctgaggaggaactggcatcaaaacagaaaaatgaagaatcaaaaaagtaagctttcttatttacaaagttctgtactgttctactagaatatattatttcgttgcaaatttcgttgtgggaactctggggaaaaaaatgaggcctttatttgcatttagaggatataaatgtttccagatttccaatcttaaaaaaaatggaattttgtgtaatgaggtattttactaggaactcaagtgctttaaaaaatggctttcaaatttagaaaaagcttgtatgaatcttttatagaaatgtgtggaagttcctctctgtccttagaaataaccactacatatggtttatgcgtctgtacttttttattgtacaaaagtgcaagtttttaaaaaatagaatatgttgcagaactatatactcatatatgactgagggttttgacagtattatagttttagttctttattgtaaaggttggctgtaatgtcttccccagggcttttctaaaagcctcctctcagtctctgaactatctggactctagaatgtaccgggaggagcgaggaatgaacccacagactcttttgcttttagcggtctaacagaggctaagagtctaaatccactggttctcatgccccagctagcctgtgggctccatcccgcttccattagtaacagtggctctgtctccaccaccagagtggttctccacccagagagaattagcacctctgggactggagggagcagctggggttagtttgaaacatgcccccagatggtctggaagcattcctccctctctggtcacttatcctttttgtggtcttcagcgttgtcatggccctgttcctctgagcatagtacgggcttgggacatttcccatagagtgcttcaggtctaaaacccgagactgctccttgtcactgactctcacacctgacggcagctagggacgtcagggtttcatgtcgtggcagctctttgatagtggttattgccttggttcttgctgaggatgcatattgagtgaagttggaatacgaaattatttgtagaatgtgtctgctactcattgaaaatttgttagaaaagctttgttttcttcacattctaaagtgttcaaattcctcctaggaggcagtgggctttggaagactttgaaattggtcgccctctgggtaaaggaaagtttggtaatgtttatttggcaagagaaaagcaaagcaagtttattctggctcttaaagtgttatttaaagctcagctggagaaagccggagtggagcatcagctcagaagagaagtagaaatacagtcccaccttcggtgagttttcaggttcatgttcaaaagaatgttcaccaatgctgcacccctccccctcctgtaatgtcagcctcccactgcccaggtcccttcactccctcttacgaggcactgccttcaaatgcatggccccgttcctcacctccccctcccctatgaaaaagattagataagcttctgtactgcactgggttataagcattctcctgtgattctcccatgctctgcatgttaaaataaaattgtattcctttttttttttttaagtataaatttattttttagagggcctgcttttcatagtaccacaaaaaatgattaaatttgtcatctttcaaagagcacttaagtgctctgatcctggaaaaatcacttgaggatttaatgttttgttaatagaatagtttatatgggcaagtctttctggtggacagtgaaggggaatggcaccccttattctgaggtatgcaggaattgcgagcagctacctgcaggttgactacggctggtgggtttttgtttttcctttttttctttcagtgtttttcaaatttgaatcagatgctaatacttcaagtctggccacatcaggcctggtgtgtctctgcctggcaacacctggctggggctgggaggggcaggcatctcacatgggctgtgcttcccattgcctgcttcccgctggccacagtctgcacctgcccagtctgctcagcacccatctactgccattactgatcactgcttttatctgtcacagtgtctgggtgtcaaactactgtggcaatgccatgtcctttttttttttcctttttttttttgagatggagtctcgctctgttgcccagactggagtgcagtggcgcaatctcagctcactgcaacctctgcctcccaggttaaagcgattctcctgcctcagcctcctgagtagctaggattgcaggcatgcaccaacaagcctagctaatttttgtatttttagtagagacgaggtttcaccatgttggccaggctggtcttgaactcctgacctcgcgatcctcccgcctcggcctcccaaagtgctgggattacaggcgtgagccactgtgcccggccatgtcctttttttaatatgtagataattaatattcagctgaattttcctcctaagaataaaggtgcctaaaggaaggaaatagtcttaactaaaccagaggtccattaatactgtgaagtgcttttaaaatgatatgtgggtgtatgtatttttcttggagtgggtttatagtttcagattctaaagtggggtttggagtgtggtttcatgtgaaacaccactggttttacatgaagagtttgtttgacattttgtacatagtcttctgtgagctccaaaccaagtgttagaatgtttatcctttgttgcaggcatcctaatattcttagactgtatggttatttccatgatgctaccagagtctacctaattctggaatatgcaccacttggaacagtttatagagaacttcagaaactttcaaagtttgatgagcagagaactgctactgtaagtgttcatttattgtccaggctaattgtgtttcctttatacctgtcctccatagcaatgtacctttcatcatagtagagtgggttttgtcttgacgtaaggatagcttaatatcaaatatttgaagtggaaaaatcaaaatagcttagttgtaccatatgtacagataaagtctagaaccaggtagaatgttgtatctgcttttgtgcctagtttgcacagctgttttctatggaaatgtatataatgtatatagatagtcaccctcattttctttaatagatgttttattttagaataatttttattttattttattttttttaaagggacagggtcttgttatgttgcccaggctggactcaagtgattctccacctcagcctcccgagtagctgggactacaggtgcacaccattgtacctggctaggatagttttagatttacagaaattgtgaaggcagtacagagagttcccatataccccacactgaatttcctactaattctcctactaacatcttgcattaatatggcacatttgtcacattcaatgaaccaatattgatatataactattaactcaagtccacattttattcagattttcttagtttttctcatgattaaattgggcttatgggtttttgagagggagatcagaggtaaagtgcattcttatcacataccagggatgtaaactcttatgacttttaactgtggatgtcagcttgatcttctgactcagagagtgtttgtctggtttctccactgtaaagttactattttttcccctttccgtgctgtatttcttcaaaggaagttactatgaatagcccacacttaaggagtagagagtggatggagtattgccataaattatctggaattctgtgccagagataaggctgttctcccttatttatttaatcatttatttatttaaagatgtagactcctgggtatttattttatctcttgagctataatgcaatactttattttgtggttcagatcattgcaactttggccactgggaactttttttctttctttttttttttttttctttttgagacggagtctcactctgtcgcccaggctggagtgcagtggcgctatcttggctcactgcaacctcagcctcccaggttgaagcgattcttctgcctcagcctcccaagtagctggaagtacaggcacccaccaccacacctggctaatttttgtatttttagtagagacggggtttcaccatattggccaggctggtcttgaactcctgaccttgtgatccacccacctcagcctcccaaagtgctgggattacaggcatgagccaccgtgcccggcctgctctttttgttttaccaggttcctgggaaaatcattgcagttttgtcttgcgtgtgtgtggtttttttttggtttgtttttacacttcctttttttttttttctttttttgagatggaatctcactctgtcgcccaggctggagtgcagtggcataatcttggctcactgcagccttcacctcctgggttcaagcgattctcctgcctcagcctcctgagtagctaggattaacaggcatgcaccaccacacccggctcatttttgtatttttagtagagatggggttttgccatgttggccaggctggtctctaacccctgacctcaggtaatctgcccgcctcagcctcccaaagtgctaggattacaggtgtgagccaccacgcctggccttgtacttccttactttctgatacaagatgctcaggcctcatcgtgtatatttcctgctccagtcctagaatcgaaccacttctccaaggagccctgtttccttttcttggagaatgttattagaaaccaagctctgggcacttggtgtactcattgctactatggtgtcactacttttaggctttcagctgacacagcaagggaatatatgtggatagtaatctgtgtatagatttatccatctatctcttcattaagcataccatgaattcatactgatgtcttcaacttgaatccattaccacgtttcattctaacttcctcctgtttacctgtaaactcccactccaaaagtgtgaaacctggatttcaccgcccaccatccttttacttattcaattccaatatacatgtataatggtatcagaattgttaaccagctgccacgtgggaaccaactttatcaattagagtgcttatgtgcacttcctttggcctttgtcttatagattccactcatttccaaagctgcttggatcaacactttaccctcatgccctttagtaaggtggtttcctacatttgtaatgcaatgagatttttttgtcacaatctgcatgcccaggatggaatcatttacattttcatatcctgagattgatttttgtgtgtttgctgtaaagttctatgaatttcgacaaatacacaatgccatgtatccaccattatgatatagagaatagtttcgctgctcttaagaaaaaaaaaatcctgtgtctcaactactcatcccttccaacccttccatctctggcaaccactgatctgtttactgtctctattgccttttccagaatatcatgtaattggaatcataacagtatgtagcttttttaggtgggcttcttccacttagcaatatgcattgaagattcatctgtgtatttttggaggcatgagagcttgttcatttctgtttatcacaaaatcatattccattatttcattatatggaagtacctcagtttattcgtctactgaagggtatcttggctgcttctggtttttggcagttatcatgttttggctgtcaacatttgcatgcaggtttttgcgaaacaagtcttcaaattagttgggcacatatataggagtgctattgccagctcatacggtaagactatattttgctttgtgaggaactgtcagtcttccaaagtgatttttacattatattttacattgcattacaaatgtaggaaatcaccttactaaagggcatgagggtaaagtgttgatccaagcagctttggagatgagtggagtctataagacaaaggccaaaggaagtgcacataagcactctaattgataaagttggtttccgtggggcagctggttaacaattctgataccattatacaacggtaatgtggtatcggaaccaatgaattgaggtcctcttgcttctcatagttgccaacatttgatgtcagtgttttggatttttgtttgtttgttttgagacaaggtctcactgtcgcccagactggagtgcaatggcatgatcacccacctcaaactccctggctcaagcaatcctcccatctcagcctcccaagtagctaggactacaggcatgtgctctcgtgcctggctaatttttgtatttttttgtagagacaaggttttgccttgttgcccaggtcggtttcgaaatcctggtctcaagtaattcatgcctcccaaaatattgggattacaggagtgagccactatacctggcctcttgttttgcattttagttattctaatcggcatgtggtggtatctcattgttttgatttctagtttcctaatgacatttgatgttgaacgtctctttttttttttgagacggagtctcgctctgtcaccaggctagagtgtagtggtgcgattttggctcactgcaacctccgcctcttgggttcaagcgattctcctgcctcagactcctgagtagctgggactacaggcacgtgccaccatgcccagctaatttttgtacttttagtagagatggggtttcgccatgttggccaggatggtcttgatctcttgaccttgtgatccacctgcctcggcctcccaaagtgctgggattataggcgtgagccactgcgcccggccttgaacatctttttatgtgtttatttgccatctgtgtatcgtctttgaggcacctgttgaaatcttttgctctttttttttttgagttttgagttttaagagttctttgtatattttggatgcaggtcatctgtcacacatgttttgcaaatattttctcccaatccgtgccttgtatttttgttctcttatctgtgtctttcacaaggctgttttttatttatttttttgagaaagggtttcactctgtcagccaggctggggtgcagtggtgcgatctctgctcactgcagcctctgcctgttgagctcaagtgatcctcctgagtaggtgagactacaggtgggtaccaccacgcccagctaatttttgtattttttgtatagacacggtctcatcatgttgcccaggttgttttttttgaggcattcttgctttgtcacccaggctggagggcagtgacgtgatcttggttctcagctcactgcaacttctacctcctgtgttcaagcagttctcctgcctcagcctcctgagtagctgggattacaggcatgagccaccacgcccagctaatttttgtatttttagtagagacagggtttcatcatgttggccagtctggtcttgaactcctgacctcaggtgatttgcccacctcggcctcccagagtgttgggattgcaggcatgagccactgtacccggcctcccaggctgtatttttaataaaagtccaaatgtgtcagttttttctttcatgattgtgcttttttgcttctccttttttatgtgattaaaattacttgttttaagaagttgaagagtcttagtttgggccgtttcttattggattggcagcttgataaagcatgttgaatggtggttactttgatttttttctgtttcttggtggagatctccgggtagtgtggacattagttctctttttggcattgatgtaaatggcatttaaattcaagtaattttactttcagtatctgatgaaatcatgctactatggacaaatggctctttggtcttgtctctgcaacaatgacatgctgttttaaagacttaatcttaaatgtttgtgcttctcctaagtagaaatagatctctaatttgcttttttaaatattagctaaacaaatcagcttcttatttaattggcaattaatatttctttgagttcatcttttgggccaactttctcttacagatcaataagtaaatctatgctcattaatggtagtgactctacctcaggtactcacattttacccttggtttttttcctggtaatcttgcttatggtgggttgtagtttgttgtttcaggtcagttaatctttttcttcagtttctgatattgatatcctactttaaaagattcaccttataccaacactacaaaattacacattatactacttctctgttttctctccttacacccaaggcttcaatctagatggagttttggtgtaagcagatagctgtttgaaagaaaatgaaagatcatttctgtctagattccttagcagttagaatgaatacacatgtacctgttttccttttcagatgaattcaaataaaactaattgtagtgacatgtcagtgacctatccatatctgcaatctaacaacatgtgaggtgtggaggaagtggcagtgccagagggctatcatgaaactaatagcttcttgtctggaagtgatttgaggagtgaaatccattgccctctcaaactttaatgtgtgcaattaaagcatcagcaactcaaagttggtggtcagaagagcagctttctttgtatttgccttcagtttattgtggtctgaattttgatctccggttttgggctgaaagaatgaaaagtgtttattctgacagtgacatttggtttttactcatctgtttagtaaacctttttgatgtaaaataatgttcaatcctgtctagaaattgctgtagaaagcaaactcttctcaaactttaggcagagctaaatatattttttcaatattcaaacagttatctgtatgttaaaataaattctgggccaggcatggtagctcacgcttgtaatctcagcacttggagaggccaaggtgggaggatcacttgaggtcaggaattagcgaccagcgtaggcaacatggggagactgtctctacaaaaaaaaaaaaaaaaaaaagaaagattaaaaattagctgggcatggtggcacacacctgtagtcccagctactcggaaggaggctgaggtgggaggattgcttacggccaggagttcaaggctgcagtgaggtatgatcatgccatagcaatccaggctgggtgacagagtgagaccctgtctcttaaaaataaataagtaaatacatacatactggacttgtttgctaaatcttagcgatagggactgtaaaacttttctttttcttgcttttttttgagacggaattttactcttgttgcccaggctggagtgcaatggcatgatctcggctcactgcaacctctacctcctgggttcaaccaattctcctgcctcagcctcccgagtagctgcgattataggcatgcaccactacacttggctaatttttgtatttttagtaaagacagggtttcaccatgttggtcaggccggtctcgaactcctgacttcaggtgatccacctgtcttggcctcccaaagtgctgggattacaggtatgaaccactgcacctggccaggaaaacttttcttacaagatggtaattcggtcgggtgcagtggctcatgtctgtaatcctagcacgttgtgaggctgagatgggaggatcacttgaggccaggagtttgagaccagcctggtcaacatagtgagacccccatctctattaaaaaaaaaaaagatagtaacttaaggaaataaaattaacaaaaggactgatttcttatgtacttctatgctgacttagtgtaacccaaaatttaacatgctatttaatatgtcagtgcaactgctttttagtttctgtttattgttcaggataattttttctcctgatattcttgaagtaaatttttagctttaaacaaattcttctgtcacagaatgaccttggttttaaaaaagggaattgactatacttgcaaagttcattttttttttctaaaaaagaaaaaggcagtatttacacatctgaatccttaatttgtaccagttcttcagcactgtcttacttcctggctgcagggccatttgttgccgtatggtgttgtaactttaggttggtgcaaaagtaactgtgttttgcattgacatggcaccagcctaagagctagctctaactggctgaatgtcttttctgactttcaacatcacaccagctgtattagcagagatgactaagcattgggtaatttcacttcatgctaaccactataaattggttcagttgatgtgtgtgtgtgtgtgtgtgtgtgtgtgtgtgtgtagactcctatataatttctacaatccttgctttaaaacctgcaaaatgtattttttgttttgtcttttcctttttgagacagggtctccttctgtcacccaggctgaagtgtgatcatggctcactgcagctttgacctcctggtctcaagcaatcctcctgcctcagcctcccaagtagctgggactacaggcatgcaccatcacgctcagctaatttttaaatttttgtagagatggagtcttgctatgtttcccaggctggtcttgaacccctgggctcaagtgatcctcccacctcagtcccccaaagtgttgggattataggtgtgagccactgtgcctggccaaaacctgcaaaccatgttaaatctatgttgtgttcctttcggaagagatgtctaatattaacttgtgttatataaaatctaaaacataggctttcaatattgttttaacagtatataacagaattggcaaatgccctgtcttactgtcattcgaagagagttattcatagagacattaagccagagaacttacttcttggatcagctggagagcttaaaattgcagattttgggtggtcagtacatgctccatcttccaggtatgtaactttagaggtggaagttgtttggtttaccaaagccctgggagctaaccgtgagctaaatgtaaaatatttcagtgtagattttgtgctgtaagaggggtaggtggctaacccagaagtactttggagtaatttaggcttaataataaactagggtttgcaagaaagtgttattctgtggagatttggggctattagcagtgttctaggcctagggttgaagatgcttaatgtccttagaggctaatgaagggatgaatgagtcaacagataggacacgtatatgacagaggtgaagtgcccacatgttgagtgggaggaactcttcacctctgctgcttcctggatgaggagatggggagatggttcagaggacagcactgacaaagatctagagctcagagtgcaggccatatcagggaacttgaaacactaaattagtttggtggtgctttgagggcagtggtgagagattctcttcagtctgcctctgtcaatagtagggatagtcctttcttatcccctgtcacagctgaagcagagatgtcagtctcaaaacaattcaaatcttagctttccaagtgaactacaatatctttactgttttaaatttgagtttaaataagctttgaaacttcacatgaagtggggcattttaaaacatatatctaccgatgaagttttgtcaactttggaggaggactcaaattatagccaaatgacttaaaaatcaagctagttaaaaaaaaagtatagcctaaaatagaatatgagggagaaaacctttgcttttgttacagagcacttctaattgttccagcaatgcactgaatctgctattgcagtctttttttttttttttttttttaaactggttgtcattagtgggagctgttatctggtgagacaaaccagaataaagacttacaggcttcatggaatcgcagagttaaactgtatcttaaccggttgaattgtgatagaaaagatggcttcttgctttttgaaaagattacttacataaccgatagtcacttcactccaaatcccagatgttaatcatcatcatttcctggttattgcctcagtttgagaacccccgattcagtccgtcggtgctgatggaggggttagatgaccagagtggtagcttcttaatcctacgtcacaattcagtggtgagtgactgtttgtgtgctcagtgggtgccaggcctggctgaacacagcaccagggctgtgaccacgtaagcctccatggtgaagagcagctgataacaaagcaacacgaacccacacagactgttctggcttgctgtctgctgttcccagcttttttccaaccttcgttaaaaaaacctaaaccgataaaaatgcggaattggtagttgatggcatacctgtctatacagtgcctacgttcagcagtttttcccatttagtcagaagggctgcatctgcttttttagtgaacacttgaaaatacgttgcaaacatcatgatgcttcaaccttaagcactataatagaatgcatttcctaaataaggatattctcctatataactagaaccatgatcactcctaagaaaattaacagcattgtcagtatctaatatttagtccacattcagatttctcctattgtccatgacatcttatagctggtttgtaaaatcagaactcaaccaaagcccatgctttgtattggactgtctatgtggttggattgtctctgtggttggactgtctctgtggttggactgtctctgtggttggattgtctctgtggtctaaagccagaccagtctcccactttaaagaggacttttctgattgtgttgccacttaacttggacctttattccccgtatttgctgaaaactggaatgtaggtctcaggtcctgaagagattcaggttaagaaaatttttttttttttttgagacagagtctcgctctgtcacccaggctggagtgcagtggtgcgatcttggctcactacaagctcgcctcccgggttcacgccattcttctgcctcagcctcctgagtagctaggactacaggcgcacaccaccacacccggctaattttttgtatttttagtagatacggcgtttcaccatgttagccaggatggtctcgatctcctgacctcgtgatccgcctccctcggcctcccaaagtgctggcattacaggcatgagccactgcacccagccaggttaaatatttttggcaagagtacttcataggccaccctcaaaatttcagcatcactcgtaccaagtatctatcacaaggcagcatgtgtctacatctccaccccagtgctgttacagtgggacagtttctagtgtattgtcattgcgaccaggcttttaagattcttagcatatctgtaatatccacatgcagatgtagaatccaaatcgtatttacagagaactttgcatggcagcttttatatggtagtgatacattcagtttcttacattctagattattcagggaggttctggagttggacagatttggggttaagcctgatggctagctgtgtgaccttacacacctcgcttcatctgtttcctatgggaatttataatagtagctacttcctagggcacaggatctggcccaggggaagacctcagtgttagtggactctttaatgattgttagcagctgttgtgatcataaaacgagaagcacatcaacctgagcctccctccgttttcaggaggaccactctctgtggcaccctggactacctgccccctgaaatgattgaaggtcggatgcatgatgagaaggtggatctctggagccttggagttctttgctatgaatttttagttgggaagcctccttttgaggcaaacacataccaagagacctacaaaagaatatcacgggtaagacgcaactgaaaaggacccagcacatctgctggaattctttccttatcagcctgaactgcaggccaagatccgaacatctatactatttgatctctctaacctgtgttttgtgatattttatcatttgttgtactccaggttgaattcacattccctgactttgtaacagagggagccagggacctcatttcaagactgttgaagcataatcccagccagaggccaatgctcagagaagtacttgaacacccctggatcacagcaaattcatcaaaaccatcaaattgccaaaacaaagaatcagctagcaaacagtcttaggaatcgtgcagggggagaaatccttgagccagggctgccatataacctgacaggaacatgctactgaagtttattttaccattgactgctgccctcaatctagaacgctacacaagaaatatttgttttactcagcaggtgtgccttaacctccctattcagaaagctccacatcaataaacatgacactctgaagtgaaagtagccacgagaattgtgctacttatactggttcataatctggaggcaaggttcgactgcagccgccccgtcagcctgtgctaggcatggtgtcttcacaggaggcaaatccagagcctggctgtggggaaagtgaccactctgccctgaccccgatcagttaaggagctgtgcaataaccttcctagtacctgagtgagtgtgtaacttattgggttggcgaagcctggtaaagctgttggaatgagtatgtgattctttttaagtatgaaaataaagatatatgtacagacttgtattttttctctggtggcattcctttaggaatgctgtgtgtctgtccggcaccccggtaggcctgattgggtttctagtcctccttaaccacttatctcccatatgagagtgtgaaaaataggaacacgtgctctacctccatttagggatttgcttgggatacagaagaggccatgtgtctcagagctgttaagggcttatttttttaaaacattggagtcatagcatgtgtgtaaactttaaatatgcaaataaataagtatctatgtctgtgtggagtgctgtgtaattctttccaccatctgttcattgttggcctggaaatgagcaggggctgagaggagcaggtctcgccctcatctagtcctgcctcttctggtctctcctgttgggtgtactcctaatacttcattatatatattgtttatatatttgtcatatctttgtcatctgtccatcgactaaagatacggtgaaagtgactgtgatgaaggaaaagtagaagtgttgaacttagagctagtagagaaatctgcttgcatggccaatgctcagtgcaagaaactggacagcaggtatgtcaggatatgtcataacaaagtggccaatatagagaaacttaaaaacatgactcagtaaaactgcagctgccagcccccttgggacaaaggggcttctggttctcatagtcttgagctgaactgactttgaccttcccaaatagttcatgtgccaccctcccaagctatagttattatcacgtgactgactttcccagtgacaccagtgagacttgggacgtttccccagacaatcccacacaagcaaagaaaaagctcattgtagtagcacattaatacactggtcacag

SEQ ID NO: 23 - DNA, 21 bp, Artificial sequence
  oligonucleotide forward CHI3L1
gaccacaggccatcacagtcc

SEQ ID NO: 24 - DNA, 25 bp, Artificial sequence
  oligonucleotide reverse CHI3L1
tgtaccccacagcatagtcagtgtt

SEQ ID NO: 25 - DNA, 22 bp, Artificial sequence
  oligonucleotide forward IGFBP2
ggccctctggagcacctctact

SEQ ID NO: 26 - DNA, 24 bp, Artificial sequence
  oligonucleotide reverse IGFBP2
ccgttcagagacatcttgcactgt

SEQ ID NO: 27 - DNA, 24 bp, Artificial sequence
  oligonucleotide forward POSTN
gtcctaattcctgattctgccaaa

SEQ ID NO: 28 - DNA, 19 bp, Artificial sequence
  oligonucleotide reverse POSTN
gggccacaagatccgtgaa

SEQ ID NO: 29 - DNA, 25 bp, Artificial sequence
  oligonucleotide forward HSPG2
gcctggatctgaacgaggaactcta

SEQ ID NO: 30 - DNA, 22 bp, Artificial sequence
  oligonucleotide reverse HSPG2
agctcccggacacagcctatga

SEQ ID NO: 31 - DNA, 23 bp, Artificial sequence
  oligonucleotide forward BMP2
cgcagcttccaccatgaagaatc

SEQ ID NO: 32 - DNA, 24 bp, Artificial sequence
  oligonucleotide reverse BMP2
gaatctccgggttgttttcccact

SEQ ID NO: 33 - DNA, 21 bp, Artificial sequence
  oligonucleotide forward COL1A1
cctccggctcctgctcctctt

SEQ ID NO: 34 - DNA, 22 bp, Artificial sequence
  oligonucleotide reverse COL1A1
ggcagttcttggtctcgtcaca

SEQ ID NO: 35 - DNA, 25 bp, Artificial sequence
  oligonucleotide forward NEK2
ccctgtattgagtgagctgaaactg

SEQ ID NO: 36 - DNA, 23 bp, Artificial sequence
  oligonucleotide reverse NEK2
gctcctgttctttctgctccaat

SEQ ID NO: 37 - DNA, 25 bp, Artificial sequence
  oligonucleotide forward DLG7
ccaaatggagcagactaagattgat

SEQ ID NO: 38 - DNA, 21 bp, Artificial sequence
  oligonucleotide reverse DLG7
ttgtcttggaccaggtcggat

SEQ ID NO: 39 - DNA, 22 bp, Artificial sequence
  oligonucleotide forward FOXM1
gggagacctgtgcagatggtga

SEQ ID NO: 40 - DNA, 22 bp, Artificial sequence
  oligonucleotide reverse FOXM1
tcgaagccactggatgttggat

SEQ ID NO: 41 - DNA, 24 bp, Artificial sequence
  oligonucleotide forward BIRC5
ccctttctcaaggaccaccgcatc

SEQ ID NO: 42 - DNA, 19 bp, Artificial sequence
  oligonucleotide reverse BIRC5
ccagcctcggccatccgct

SEQ ID NO: 43 - DNA, 24 bp, Artificial sequence
  oligonucleotide forward PLK1
gcagatcaacttcttccaggatca

SEQ ID NO: 44 - DNA, 22 bp, Artificial sequence
  oligonucleotide reverse PLK1
cgcttctcgtcgatgtaggtca

SEQ ID NO: 45 - DNA, 22 bp, Artificial sequence
  oligonucleotide forward NKX6m1
gagagggctcgtttggcctatt

SEQ ID NO: 46 - DNA, 22 bp, Artificial sequence
  oligonucleotide reverse NKX6m1
cggttctggaaccagaccttga

SEQ ID NO: 47 - DNA, 24 bp, Artificial sequence
  oligonucleotide forward NRG3
agccatgtccagctgcaaaattat

SEQ ID NO: 48 - DNA, 24 bp, Artificial sequence
  oligonucleotide reverse NRG3
gccgacaaaacttgactccatcat

SEQ ID NO: 49 - DNA, 23 bp, Artificial sequence
  oligonucleotide forward BUB1B
actacagtcccagcaccgacaat

SEQ ID NO: 50 - DNA, 25 bp, Artificial sequence
  oligonucleotide reverse BUB1B
tgcttcgttgtggtacagaagactc

SEQ ID NO: 51 - DNA, 23 bp, Artificial sequence
  oligonucleotide forward VIM
ctccctctggttgatacccactc

SEQ ID NO: 52 - DNA, 25 bp, Artificial sequence
  oligonucleotide reverse VIM
agaagtttcgttgataacctgtcca

SEQ ID NO: 53 - DNA, 21 bp, Artificial sequence
  oligonucleotide forward TNC
gagggtgaccaccacacgctt

SEQ ID NO: 54 - DNA, 24 bp, Artificial sequence
  oligonucleotide reverse TNC
caaggcagtggtgtctgtgacatc

SEQ ID NO: 55 - DNA, 20 bp, Artificial sequence
  oligonucleotide forward DLL3
ctctgctaccaccggatgcc

SEQ ID NO: 56 - DNA, 24 bp, Artificial sequence
  oligonucleotide reverse DLL3
tcaaaggacctgggtgtctcacta

SEQ ID NO: 57 - DNA, 23 bp, Artificial sequence
  oligonucleotide forward JAG1
gaaaacgtgccagttagatgcaa

SEQ ID NO: 58 - DNA, 24 bp, Artificial sequence
  oligonucleotide reverse JAG1
gctggcaatgagattcttacagga

SEQ ID NO: 59 - DNA, 22 bp, Artificial sequence
  oligonucleotide forward KI67
attgaacctgcggaagagctga

SEQ ID NO: 60 - DNA, 22 bp, Artificial sequence
  oligonucleotide reverse KI67
ggagcgcagggatattccctta

SEQ ID NO: 61 - DNA, 23 bp, Artificial sequence
  oligonucleotide forward EZH2
aacttcgagctcctctgaagcaa

SEQ ID NO: 62 - DNA, 23 bp, Artificial sequence
  oligonucleotide reverse EZH2
agcaccactccactccacattct

SEQ ID NO: 63 - DNA, 22 bp, Artificial sequence
  oligonucleotide forward BUB1
ccatttgccagctcaagctaga

SEQ ID NO: 64 - DNA, 23 bp, Artificial sequence
  oligonucleotide reverse BUB1
caggccatgttatttcctggatt

SEQ ID NO: 65 - DNA, 24 bp, Artificial sequence
  oligonucleotide forward AURKA
gcatttcaggacctgttaaggcta

SEQ ID NO: 66 - DNA, 23 bp, Artificial sequence
  oligonucleotide reverse AURKA
tgctgagtcacgagaacacgttt

SEQ ID NO: 67 - DNA, 1867 bp, Homo sapiens
cacatagctcagttcccataaaagggctggtttgccgcgtcggggagtggagtgggacaggtatataaaggaagtacagggcctggggaagaggccctgtctaggtagctggcaccaggagccgtgggcaagggaagaggccacaccctgccctgctctgctgcagccagaatgggtgtgaaggcgtctcaaacaggctttgtggtcctggtgctgctccagtgctgctctgcatacaaactggtctgctactacaccagctggtcccagtaccgggaaggcgatgggagctgcttcccagatgcccttgaccgcttcctctgtacccacatcatctacagctttgccaatataagcaacgatcacatcgacacctgggagtggaatgatgtgacgctctacggcatgctcaacacactcaagaacaggaaccccaacctgaagactctcttgtctgtcggaggatggaactttgggtctcaaagattttccaagatagcctccaacacccagagtcgccggactttcatcaagtcagtaccgccatttctgcgcacccatggctttgatgggctggaccttgcctggctctaccctggacggagagacaaacagcattttaccaccctaatcaaggaaatgaaggccgaatttataaaggaagcccagccagggaaaaagcagctcctgctcagcgcagcactgtctgcggggaaggtcaccattgacagcagctatgacattgccaagatatcccaacacctggatttcattagcatcatgacctacgattttcatggagcctggcgtgggaccacaggccatcacagtcccctgttccgaggtcaggaggatgcaagtcctgacagattcagcaacactgactatgctgtggggtacatgttgaggctgggggctcctgccagtaagctggtgatgggcatccccaccttcgggaggagcttcactctggcttcttctgagactggtgttggagccccaatctcaggaccgggaattccaggccggttcaccaaggaggcagggacccttgcctactatgagatctgtgacttcctccgcggagccacagtccatagaatcctcggccagcaggtcccctatgccaccaagggcaaccagtgggtaggatacgacgaccaggaaagcgtcaaaagcaaggtgcagtacctgaaggacaggcagctggcgggcgccatggtatgggccctggacctggatgacttccagggctccttctgcggccaggatctgcgcttccctctcaccaatgccatcaaggatgcactcgctgcaacgtagccctctgttctgcacacagcacgggggccaaggatgccccgtccccctctggctccagctggccgggagcctgatcacctgccctgctgagtcccaggctgagcctcagtctccctcccttggggcctatgcagaggtccacaacacacagatttgagctcagccctggtgggcagagaggtagggatggggctgtggggatagtgaggcatcgcaatgtaagactcgggattagtacacacttgttgattaatggaaatgtttacagatccccaagcctggcaagggaatttcttcaactccctgccccccagccctccttatcaaaggacaccattttggcaagctctatcaccaaggagccaaacatcctacaagacacagtgaccatactaattataccccctgcaaagcccagcttgaaaccttcacttaggaacgtaatcgtgtcccctatcctacttccccttcctaattccacagctgctcaataaagtacaagagcttaacagtgaaaaaaaaaaaaaaaaaaaaaaaaaaaaaa

SEQ ID NO: 68 - DNA, 1439 bp, Homo sapiens
tgcggcggcgagggaggaggaagaagcggaggaggcggctcccgcgctcgcagggccgtgccacctgcccgcccgcccgctcgctcgctcgcccgccgcgccgcgctgccgaccgccagcatgctgccgagagtgggctgccccgcgctgccgctgccgccgccgccgctgctgccgctgctgccgctgctgctgctgctactgggcgcgagtggcggcggcggcggggcgcgcgcggaggtgctgttccgctgcccgccctgcacacccgagcgcctggccgcctgcgggcccccgccggttgcgccgcccgccgcggtggccgcagtggccggaggcgcccgcatgccatgcgcggagctcgtccgggagccgggctgcggctgctgctcggtgtgcgcccggctggagggcgaggcgtgcggcgtctacaccccgcgctgcggccaggggctgcgctgctatccccacccgggctccgagctgcccctgcaggcgctggtcatgggcgagggcacttgtgagaagcgccgggacgccgagtatggcgccagcccggagcaggttgcagacaatggcgatgaccactcagaaggaggcctggtggagaaccacgtggacagcaccatgaacatgttgggcgggggaggcagtgctggccggaagcccctcaagtcgggtatgaaggagctggccgtgttccgggagaaggtcactgagcagcaccggcagatgggcaagggtggcaagcatcaccttggcctggaggagcccaagaagctgcgaccaccccctgccaggactccctgccaacaggaactggaccaggtcctggagcggatctccaccatgcgccttccggatgagcggggccctctggagcacctctactccctgcacatccccaactgtgacaagcatggcctgtacaacctcaaacagtgcaagatgtctctgaacgggcagcgtggggagtgctggtgtgtgaaccccaacaccgggaagctgatccagggagcccccaccatccggggggaccccgagtgtcatctcttctacaatgagcagcaggaggctcgcggggtgcacacccagcggatgcagtagaccgcagccagccggtgcctggcgcccctgccccccgcccctctccaaacaccggcagaaaacggagagtgcttgggtggtgggtgctggaggattttccagttctgacacacgtatttatatttggaaagagaccagcaccgagctcggcacctccccggcctctctcttcccagctgcagatgccacacctgctccttcttgctttccccgggggaggaagggggttgtggtcggggagctggggtacaggtttggggagggggaagagaaatttttatttttgaacccctgtgtcccttttgcataagattaaaggaaggaaaagtaaa

SEQ ID NO: 69 - DNA, 3390 bp, Homo sapiens
agactctcaggttgatgcagtgttccctcccacaactctgacatgtatataaattctgagctctccaaagcccactgccagttctcttcggggactaactgcaacggagagactcaagatgattccctttttacccatgttttctctactattgctgcttattgttaaccctataaacgccaacaatcattatgacaagatcttggctcatagtcgtatcaggggtcgggaccaaggcccaaatgtctgtgcccttcaacagattttgggcaccaaaaagaaatacttcagcacttgtaagaactggtataaaaagtccatctgtggacagaaaacgactgtgttatatgaatgttgccctggttatatgagaatggaaggaatgaaaggctgcccagcagttttgcccattgaccatgtttatggcactctgggcatcgtgggagccaccacaacgcagcgctattctgacgcctcaaaactgagggaggagatcgagggaaagggatccttcacttactttgcaccgagtaatgaggcttgggacaacttggattctgatatccgtagaggtttggagagcaacgtgaatgttgaattactgaatgctttacatagtcacatgattaataagagaatgttgaccaaggacttaaaaaatggcatgattattccttcaatgtataacaatttggggcttttcattaaccattatcctaatggggttgtcactgttaattgtgctcgaatcatccatgggaaccagattgcaacaaatggtgttgtccatgtcattgaccgtgtgcttacacaaattggtacctcaattcaagacttcattgaagcagaagatgacctttcatcttttagagcagctgccatcacatcggacatattggaggcccttggaagagacggtcacttcacactctttgctcccaccaatgaggcttttgagaaacttccacgaggtgtcctagaaaggatcatgggagacaaagtggcttccgaagctcttatgaagtaccacatcttaaatactctccagtgttctgagtctattatgggaggagcagtctttgagacgctggaaggaaatacaattgagataggatgtgacggtgacagtataacagtaaatggaatcaaaatggtgaacaaaaaggatattgtgacaaataatggtgtgatccatttgattgatcaggtcctaattcctgattctgccaaacaagttattgagctggctggaaaacagcaaaccaccttcacggatcttgtggcccaattaggcttggcatctgctctgaggccagatggagaatacactttgctggcacctgtgaataatgcattttctgatgatactctcagcatggatcagcgcctccttaaattaattctgcagaatcacatattgaaagtaaaagttggccttaatgagctttacaacgggcaaatactggaaaccatcggaggcaaacagctcagagtcttcgtatatcgtacagctgtctgcattgaaaattcatgcatggagaaagggagtaagcaagggagaaacggtgcgattcacatattccgcgagatcatcaagccagcagagaaatccctccatgaaaagttaaaacaagataagcgctttagcaccttcctcagcctacttgaagctgcagacttgaaagagctcctgacacaacctggagactggacattatttgtgccaaccaatgatgcttttaagggaatgactagtgaagaaaaagaaattctgatacgggacaaaaatgctcttcaaaacatcattctttatcacctgacaccaggagttttcattggaaaaggatttgaacctggtgttactaacattttaaagaccacacaaggaagcaaaatctttctgaaagaagtaaatgatacacttctggtgaatgaattgaaatcaaaagaatctgacatcatgacaacaaatggtgtaattcatgttgtagataaactcctctatccagcagacacacctgttggaaatgatcaactgctggaaatacttaataaattaatcaaatacatccaaattaagtttgttcgtggtagcaccttcaaagaaatccccgtgactgtctatacaactaaaattataaccaaagttgtggaaccaaaaattaaagtgattgaaggcagtcttcagcctattatcaaaactgaaggacccacactaacaaaagtcaaaattgaaggtgaacctgaattcagactgattaaagaaggtgaaacaataactgaagtgatccatggagagccaattattaaaaaatacaccaaaatcattgatggagtgcctgtggaaataactgaaaaagagacacgagaagaacgaatcattacaggtcctgaaataaaatacactaggatttctactggaggtggagaaacagaagaaactctgaagaaattgttacaagaagaggtcaccaaggtcaccaaattcattgaaggtggtgatggtcatttatttgaagatgaagaaattaaaagactgcttcagggagacacacccgtgaggaagttgcaagccaacaaaaaagttcaaggatctagaagacgattaagggaaggtcgttctcagtgaaaatccaaaaaccagaaaaaaatgtttatacaaccctaagtcaataacctgaccttagaaaattgtgagagccaagttgacttcaggaactgaaacatcagcacaaagaagcaatcatcaaataattctgaacacaaatttaatatttttttttctgaatgagaaacatgagggaaattgtggagttagcctcctgtggtaaaggaattgaagaaaatataacaccttacaccctttttcatcttgacattaaaagttctggctaactttggaatccattagagaaaaatccttgtcaccagattcattacaattcaaatcgaagagttgtgaactgttatcccattgaaaagaccgagccttgtatgtatgttatggatacataaaatgcacgcaagccattatctctccatgggaagctaagttataaaaataggtgcttggtgtacaaaactttttatatcaaaaggctttgcacatttctatatgagtgggtttactggtaaattatgttattttttacaactaattttgtactctcagaatgtttgtcatatgcttcttgcaatgcatattttttaatctcaaacgtttcaataaaaccatttttcagatataaagagaattacttcaaattgagtaattcagaaaaactcaagatttaagttaaaaagtggtttggacttgggaacaggactttatacctcttttactgtaacaagtactcattaaaggaaattgaatgaaattaaaaaaaaaaa

SEQ ID NO: 70 - DNA, 14294 bp, Homo sapiens
gcgcggagcgagcgagcgagagagcggcgcgggccgggccatggggtggcgggcggcgggcgcgctgctgctggcgctgctgctgcacgggcggctgctggcggtgacccatgggctgagggcatacgatggcttgtctctgcctgaggacatagagaccgtcacagcaagccaaatgcgctggacacattcgtacctttctgatgatgaggacatgctggctgacagcatctcaggagacgacctgggcagtggggacctgggcagcggggacttccagatggtttatttccgagccctggtgaatttcactcgctccatcgagtacagccctcagctggaggatgcaggctccagagagttccgagaggtgtccgaggctgtggtagacacgctggagtcggagtacttgaaaattcccggagaccaggttgtcagtgtggtgttcatcaaggagctggatggctgggtttttgtggagctggatgtgggctcggaagggaatgcggatggggctcagattcaggagatgctgctcagggtcatctccagcggctctgtggcctcctacgtcacctctccccagggattccagttccgacgcctgggcacagtgccccagttcccaagagcctgcacggaggccgagtttgcctgccacagctacaatgagtgtgtggccctggagtatcgctgtgaccggcggcccgactgcagggacatgtctgatgagctcaattgtgaggagccagtcctgggtatcagccccacattctctctccttgtggagacgacatctttaccgccccggccagagacaaccatcatgcgacagccaccagtcacccacgctcctcagcccctgcttcccggttccgtcaggcccctgccctgtgggccccaggaggccgcatgccgcaatgggcactgcatccccagagactacctctgcgacggacaggaggactgcgaggacggcagcgatgagctagactgtggccccccgccaccctgtgagcccaacgagttcccctgcgggaatggacattgtgccctcaagctgtggcgctgcgatggtgactttgactgtgaggaccgaactgatgaagccaactgccccaccaagcgtcctgaggaagtgtgcgggcccacacagttccgatgcgtctctaccaacatgtgcatcccagccagcttccactgtgacgaggagagcgactgtcctgaccggagcgacgagtttggctgcatgcccccccaggtggtgacacctccccgggagtccatccaggcttcccggggccagacagtgaccttcacctgcgtggccattggcgtccccacccccatcatcaattggaggctcaactggggccacatcccctctcatcccagggtgacagtgaccagcgagggtggccgtggcacactgatcatccgtgatgtgaaggagtcagaccagggtgcctacacctgtgaggccatgaacgcccggggcatggtgtttggcattcctgacggtgtccttgagctcgtcccacaacgaggcccctgccctgacggccacttctacctggagcacagcgccgcctgcctgccctgcttctgctttggcatcaccagcgtgtgccagagcacccgccgcttccgggaccagatcaggctgcgctttgaccaacccgatgacttcaagggtgtgaatgtgacaatgcctgcgcagcccggcacgccacccctctcctccacgcagctgcagatcgacccatccctgcacgagttccagctagtcgacctgtcccgccgcttcctcgtccacgactccttctgggctctgcctgaacagttcctgggcaacaaggtggactcctatggcggctccctgcgttacaacgtgcgctacgagttggcccgtggcatgctggagccagtgcagcggccggacgtggtcctcatgggtgccgggtaccgcctcctctcccgaggccacacacccacccaacctggtgctctgaaccagcgccaggtccagttctctgaggagcactgggtccatgagtctggccggccggtgcagcgcgcggagctgctgcaggtgctgcagagcctggaggccgtgctcatccagaccgtgtacaacaccaagatggccagcgtgggacttagcgacatcgccatggataccaccgtcacccatgccaccagccatggccgtgcccacagtgtggaggagtgcagatgccccattggctattctggcttgtcctgcgagagctgtgatgcccacttcactcgggtgcctggtgggccctacctgggcacctgctctggttgcaattgcaatggccatgccagctcctgtgaccctgtgtatggccactgcctgaattgccagcacaacacggaggggccacagtgcaacaagtgcaaggctggcttctttggggacgccatgaaggccacggccacttcctgccggccctgcccttgcccatacatcgatgcctcccgcagattctcagacacttgcttcctggacacggatggccaagccacatgtgacgcctgtgccccaggctacactggccgccgctgtgagagctgtgcccccggatacgagggcaaccccatccagcccggcgggaagtgcaggcccgtcaaccaggagattgtgcgctgtgacgagcgtggcagcatggggacctccggggaggcctgccgctgtaagaacaatgtggtggggcgcttgtgcaatgaatgtgctgacggctctttccacctgagtacccgaaaccccgatggctgcctcaagtgcttctgcatgggtgtcagtcgccactgcaccagctcttcatggagccgtgcccagttgcatggggcctctgaggagcctggtcacttcagcctgaccaacgccgcaagcacccacaccaccaacgagggcatcttctcccccacgcccggggaactgggattctcctccttccacagactcttatctggaccctacttctggagcctcccttcacgcttcctgggggacaaggtgacctcctatggaggagagctgcgcttcacagtgacccagaggtcccagccgggctccacacccctgcacgggcagccgttggtggtgctgcaaggtaacaacatcatcctagagcaccatgtggcccaggagcccagccccggccagcccagcaccttcattgtgcctttccgggagcaagcatggcagcggcccgatgggcagccagccacacgggagcacctgctgatggcactggcaggcatcgacaccctcctgatccgagcatcctacgcccagcagcccgctgagagcagggtctctggcatcagcatggacgtggctgtgcccgaggaaaccggccaggaccccgcgctggaagtggaacagtgctcctgcccacccgggtaccgtgggccgtcctgccaggactgtgacacaggctacacacgcacgcccagtggcctctacctgggtacctgtgaacgctgcagctgccatggccactcagaggcctgcgagccagaaacaggtgcctgccagggctgccagcatcacacggagggccctcggtgtgagcagtgccagccaggatactacggggacgcccagcgggggacaccacaggactgccagctgtgcccctgctacggagaccctgctgccggccaggctgcccacacttgttttctggacacagacggccaccccacctgtgatgcgtgctccccaggccacagtgggcgtcactgtgagaggtgcgcccctggctactatggcaaccccagccagggccagccatgccagagagacagccaggtgccagggcccataggctgcaactgtgacccccaaggcagcgtcagcagccagtgtgatgctgctggtcagtgccagtgcaaggcccaggtggaaggcctcacttgcagccactgccggccccaccacttccacctgagtgccagcaacccagacggctgcctgccctgcttctgtatgggcatcacccagcagtgcgccagctctgcctacacacgccacctgatctccacccactttgcccctggggacttccaaggctttgccctggtgaacccacagcgaaacagccgcctgacaggagaattcactgtggaacccgtgcccgagggtgcccagctctcttttggcaactttgcccaactcggccatgagtccttctactggcagctgccggagacataccagggagacaaggtggcggcctacggtgggaagttgcgatacaccctctcctacacagcaggcccacagggcagcccactctctgaccccgatgtgcagatcacgggcaacaacatcatgctagtggcctcccagccagcgctgcagggccctgagaggaggagctacgagatcatgttccgagaggaattctggcgccggcccgatgggcagccggccacacgcgagcacctcctgatggcactggccgacctggatgagctcctgatccgggccacgttctcctccgtgccgctggcggccagcatcagcgcagtcagcctggaggtcgcccagccggggccctcaaacagaccccgcgccctcgaggtggaggagtgccgctgcccgccaggctacatcggtctgtcctgccaggactgtgcccccggctacacgcgcaccgggagtgggctctacctcggccactgcgagctatgtgaatgcaatggccactcagacctgtgccacccagagactggggcctgctcgcaatgccagcacaacgccgcaggggagttctgcgagctttgtgcccctggctactacggagatgccacagccgggacgcctgaggactgccagccctgtgcctgcccactgaccaacccagagaacatgttttcccgcacctgtgagagcctgggagccggcgggtaccgctgcacggcctgcgaacccggctacactggccagtactgtgagcagtgtggcccaggttacgtgggtaaccccagtgtgcaagggggccagtgcctgccagagacaaaccaagccccactggtggtcgaggtccatcctgctcgaagcatagtgccccaaggtggctcccactccctgcggtgtcaggtcagtgggagcccaccccactacttctattggtcccgtgaggatgggcggcctgtgcccagcggcacccagcagcgacatcaaggctccgagctccacttccccagcgtccagccctcggatgctggggtctacatttgcacctgccgtaatctccaccaatccaataccagccgggcagagctgctggtcactgaggctccaagcaagcccatcacagtgactgtggaggagcagcggagccagagcgtgcgccccggagctgacgtcaccttcatctgcacagccaaaagcaagtccccagcctataccctggtgtggacccgcctgcacaacgggaaactgcccacccgagccatggatttcaatggcatcctgaccattcgcaacgtccagctgagtgatgcaggcacctacgtgtgcaccggctccaacatgtttgccatggaccagggcacagccactctacatgtgcaggcctcgggcaccttgtccgcccccgtggtctccatccatccgccacagctcacagtgcagcccgggcaactggcggagttccgctgcagcgccacagggagccccacgcccaccctcgagtggacagggggccccggcggccagctccctgcgaaggcacaaatccacggcggcatcctgcgcctgccagctgtcgagcccacggatcaggcccagtacttgtgccgagcccacagcagcgctgggcagcaggtggccagggctgtgctccacgtgcatgggggcggtgggcccagagtccaagtgagcccagagaggacccaggtccacgcaggccgcaccgtcaggctgtactgcagggctgcaggcgtgcctagcgccaccatcacctggaggaaggaagggggcagcctcccaccacaggcccggtcagagcgcacagacatcgcgacactgctcatcccagccatcacgactgctgacgccggcttctacctctgcgtggccaccagccctgcaggcactgcccaggcccggatccaagtggttgtcctttcagcctcagatgccagcccaccgccggtcaagattgagtcctcatcgccttctgtgacagaagggcaaacactcgacctcaactgtgtggtggcagggtcagcccatgcccaggtcacctggtacaggcgagggggtagcctgcctccccacacccaggtgcacggctcccgtctgcggctcccccaggtctcaccagctgattctggagaatatgtgtgccgtgtggagaatggatcgggccccaaggaggcctccattactgtgtctgtgctccacggcacccattctggccccagctacaccccagtgcccggcagcacccggcccatccgcatcgagccctcctcctcacacgtggcggaagggcagaccctggatctgaactgcgtggtgcccgggcaggcccacgcccaggtcacgtggcacaagcgtgggggcagcctccctgcccggcaccagacccacggctcgctgctgcggctgcaccaggtgaccccggccgactcaggcgagtatgtgtgccatgtggtgggcacctccggccccctagaggcctcagtcctggtcaccatcgaagcctctgtcatccctggacccatcccacctgtcaggatcgagtcttcatcctccacagtggccgagggccagaccctggatctgagctgcgtggtggcagggcaggcccacgcccaggtcacatggtacaagcgtgggggcagcctccctgcccggcaccaggttcgtggctcccgcctgtacatcttccaggcctcacctgccgatgcgggacagtacgtctgccgggccagcaacggcatggaggcctccatcacggtcacagtaactgggacccagggggccaacttagcctaccctgccggcagcacccagcccatccgcatcgagccctcctcctcgcaagtggcggaagggcagaccctggatctgaactgcgtggtgcccgggcagtcccatgcccaggtcacgtggcacaagcgtgggggcagcctccctgtccggcaccagacccacggctccctgctgagactctaccaagcgtcccccgccgactcgggcgagtacgtgtgccgagtgttgggcagctccgtgcctctagaggcctctgtcctggtcaccattgagcctgcgggctcagtgcctgcacttggggtcacccccacggtccggatcgagtcatcgtcttcgcaagtggccgaggggcagaccctggacctgaactgcctcgttgctggtcaggcccatgcccaggtcacgtggcacaagcgcgggggcagcctcccggcccggcaccaggtgcatggctcgaggctacgcctgctccaggtgaccccagctgattcaggggagtacgtgtgccgtgtggtcggcagctcaggtacccaggaagcctcagtccttgtcaccatccagcagcgccttagtggctcccactcccagggtgtggcgtaccccgtccgcatcgagtcctcctcagcctccctggccaatggacacaccctggacctcaactgcctggttgccagccaggctccccacaccatcacctggtataagcgtggaggcagcttacccagccggcaccagatcgtgggctcccggctgcggatccctcaggtgactccggcagactcgggcgagtacgtgtgtcacgtcagtaacggtgcaggctcccgggagacctcgctcatcgtcaccatccagggcagcggttcctcccacgtgcccagcgtctccccaccgatcaggatcgagtcgtcttcccccacggtggtggaagggcagaccttggatctgaactgcgtggtcgccaggcagccccaggctatcatcacatggtacaagcgtgggggcagccttccctcccgacaccagacccatggctcccacctgcggttgcaccaaatgtctgtggctgactcgggcgagtatgtgtgccgggccaacaacaacatcgatgccctggaggcctccatcgtcatctccgtctcccctagcgccggcagcccctccgcccctggcagctccatgcccatcagaattgagtcatcctcctcacacgtggccgaaggggagaccctggatctgaactgcgtggtccccgggcaggcccatgcccaggtcacttggcacaagcgtgggggcagcctccccagtcaccatcagacccgcggctcacggctgcggctgcaccatgtgtccccggccgactcgggtgaatacgtgtgccgggtgatgggcagctctggccccctggaggcctcagtcctggtcaccatcgaagcctctggctcaagtgctgtccacgtccccgccccaggtggagccccacccatccgcatcgagccctcctcctcccgagtggcagaagggcagaccctggatctgaagtgcgtggtgcccgggcaggcccacgcccaggtcacgtggcacaagcgtggaggaaacctccctgcccggcaccaggtccacggcccactgctgaggctgaaccaggtgtccccggctgactctggcgagtactcgtgccaagtgaccggaagctcaggcaccctggaggcatctgtcctggtcacaattgagccctccagcccaggacccattcctgctccaggactggcccagcccatctacatcgaggcctcctcttcacacgtgactgaagggcagactctggatctgaactgtgtggtgcccgggcaggcccatgcccaggtcacgtggtacaagcgcgggggcagcctccccgcccggcaccagacccatggctcccagctgcggctccacctcgtctcccctgccgactcaggcgagtatgtgtgtcgtgcagccagcggcccaggccctgagcaagaagcctccttcacagtcaccgtcccgcccagtgaggggtcttcctaccgccttaggagcccggtcatctccatcgacccgcccagcagcaccgtgcagcagggccaggatgccagcttcaagtgcctcatccatgacggggcagcccccatcagcctcgagtggaagacccggaaccaggagctggaggacaacgtccacatcagtcccaatggctccatcatcaccatcgtgggcacccggcccagcaaccacggtacctaccgctgcgtggcctccaatgcctacggtgtggcccagagtgtggtgaacctcagtgtgcacgggccccctacagtgtccgtgctccccgagggccccgtgtgggtgaaagtgggaaaggctgtcaccctggagtgtgtcagtgccggggagccccgctcctctgctcgttggacccggatcagcagcacccctgccaagttggagcagcggacatatgggctcatggacagccacgcggtgctgcagatttcatcagctaaaccatcagatgcgggcacttatgtgtgccttgctcagaatgcactaggcacagcacagaagcaggtggaggtgatcgtggacacgggcgccatggccccaggggcccctcaggtccaagctgaagaagctgagctgactgtggaggctggacacacggccaccttgcgctgctcagccacaggcagccccgcgcccaccatccactggtccaagctgcgttccccactgccctggcagcaccggctggaaggtgacacactcatcataccccgggtagcccagcaggactcgggccagtacatctgcaatgccactagccctgctgggcacgctgaggccaccatcatcctgcacgtggagagcccaccatatgccaccacggtcccagagcacgcttcggtgcaggcaggggagacggtgcagctccagtgcctggctcacgggacacccccactcaccttccagtggagccgcgtgggcagcagccttcctgggagggcgaccgccaggaacgagctgctgcactttgagcgtgcagcccctgaggactcaggccgctaccgctgccgggtcaccaacaaggtgggctcagccgaggcctttgcccagctgctcgtccaaggccctcccggctctctccctgccacctccatcccagcagggtccacgcccaccgtgcaggtcacgcctcagctagagaccaagagcattggggccagcgttgagttccactgtgctgtgcccagcgaccggggtacccagctccgttggttcaaggaagggggtcagctgcctccgggtcacagcgtgcaggatggggtgctccgaatccagaacttggaccagagctgccaagggacgtatatatgccaggcccatggaccttgggggaaggcccaggccagtgcccagctggttatccaagccctgccctcggtgctcatcaacatccggacctctgtgcagaccgtggtggttggccacgccgtggagttcgaatgcctggcactgggtgaccccaagcctcaggtgacatggagcaaagttggagggcacctgcggccaggcattgtgcagagcggaggtgtcgtcaggatcgcccacgtagagctggctgatgcgggacagtatcgctgcactgccaccaacgcagctggcaccacacaatcccacgtcctgctgcttgtgcaagccttgccccagatctcaatgccccaagaagtccgtgtgcctgctggttctgcagctgtcttcccctgcatagcctcaggctaccccactcctgacatcagctggagcaagctggatggcagcctgccacctgacagccgcctggagaacaacatgctgatgctgccctcagtccgaccccaggacgcaggtacctacgtctgcaccgccactaaccgccagggcaaggtcaaagcctttgcccacctgcaggtgccagagcgggtggtgccctacttcacgcagaccccctactccttcctaccgctgcccaccatcaaggatgcctacaggaagttcgagatcaagatcaccttccggcccgactcagccgatgggatgctgctgtacaatgggcagaagcgagtcccagggagccccaccaacctggccaaccggcagcccgacttcatctccttcggcctcgtggggggaaggcccgagttccggttcgatgcaggctcaggcatggccaccatccgccatcccacaccactggccctgggccatttccacaccgtgaccctgctgcgcagcctcacccagggctccctgattgtgggtgacctggccccggtcaatgggacctcccagggcaagttccagggcctggatctgaacgaggaactctacctgggtggctatcctgactatggtgccatccccaaggcggggctgagcagcggcttcataggctgtgtccgggagctgcgcatccagggcgaggagatcgtcttccatgacctcaacctcacggcgcacggcatctcccactgccccacctgtcgggaccggccctgccagaatggcggtcagtgccatgactctgagagcagcagctacgtgtgcgtctgcccagctggcttcaccgggagccgctgtgagcactcgcaggccctgcactgccatccagaggcctgtgggcccgacgccacctgtgtgaaccggcctgacggtcgaggctacacctgccgctgccacctgggccgctcggggttgcggtgtgaggaaggtgtgacagtgaccaccccctcgctgtcgggtgctggctcctacctggcactgcccgccctcaccaacacacaccacgagctacgcctggacgtggagttcaagccactcgcccctgacggggtcctgctgttcagcggggggaagagcgggcctgtggaggacttcgtgtccctggcgatggtgggcggccacctggagttccgctatgagttggggtcagggctggccgttctgcggagcgccgagccgctggccctgggccgctggcaccgtgtgtctgcagagcgtctcaacaaggacggcagcctgcgggtgaatggtggacgccctgtgctgcgctcctcgcccggcaagagccagggcctcaacctgcacaccctgctctacctggggggtgtggagccttccgtgccactgtccccggccaccaacatgagcgctcacttccgcggctgtgtgggcgaggtgtcagtgaatggcaaacggctggacctcacctacagtttcctaggcagccagggcatcgggcaatgctatgatagctccccatgtgagcgccagccttgccaacatggtgccacgtgcatgcccgctggcgagtatgagttccagtgcctgtgtcgagatggattcaaaggagacctgtgtgagcacgaggagaacccctgccagctccgtgaaccctgtctgcatgggggcacctgccagggcacccgctgcctctgcctccctggcttctctggcccacgctgccaacaaggctctggacatggcatagcagagtccgactggcatcttgaaggcagcgggggcaatgatgcccctgggcagtacggagcctatttccacgatgatggcttcctcgccttccctggccatgtcttctccaggagcctgcccgaggtgcccgagaccatcgagctggaggttcggaccagcacagccagtggcctcctgctctggcagggtgtggaggtgggagaggccggccaaggcaaggacttcatcagcctcgggcttcaagacgggcaccttgtcttcaggtaccagctgggtagtggggaggcccgcctggtctctgaggaccccatcaatgacggcgagtggcaccgggtgacagcactgcgggagggccgcagaggttccatccaagtcgacggtgaggagctggtcagcggccggtccccaggtcccaacgtggcagtcaacgccaagggcagcgtctacatcggcggagcccctgacgtggccacgctgaccgggggcagattctcctcaggcatcacaggctgtgtcaagaacctggtgctgcactcggcccgacccggcgccccgcccccacagcccctggacctgcagcaccgcgcccaggccggggccaacacacgcccctgcccctcgtaggcacctgcctgccccacacggactcccgggccacgccccagcccgacaatgtcgagtatattattattaatattattatgaatttttgtaagaaaccgaggcgatgccacgctttgctgctaccgccctgggctggactggaggtgggcatgccaccctcacacacacagctgggcaaagccacaaggctggccagcaaggcaggttggatgggagtgggcacctcagaaagtcaccaggacttggggtcaggaacagtggctgggtgggcccagaactgcccccactgtccccctacccaccgatggagcccccagatagagctgggtggcctgtttctgcagcccttgggcagttctcactcctaggagagccaacctcggcttgtgggctggtgccccacagctacctgagacgggcatcgcaggagtctctgccacccactcaggattgggaattgtctttagtgccggctgtggagcaaaaggcagctcacccctgggcaggcggtccccatccccaccagctcgtttttcagcacccccacccacctccacccagcccctggcacctcctctggcagactccccctcctaccacgtcctcctggcctgcattcccaccccctcctgccagcacacagcctggggtccctccctcaggggctgtaagggaaggcccaccccaactcttaccaggagctgctacaggcagagcccagcactgatagggccccgcccaccgggccccgcccaccccaggccacatccccacccatctggaagtgaaggcccagggactcctccaacagacaacggacggacggatgccgctggtgctcaggaagagctagtgccttaggtgggggaaggcaggactcacgactgagagagagaggagggggatatgaccaccctgccccatctgcaggagcctgaagatccagctcaagtgccatcctgccagtggcccccagactgtggggttgggacgcctggcctctgtgtcctagaagggaccctcctgtggtctttgtcttgatttttcttaataaacggtgctatccccgccaaaaaaa

SEQ ID NO: 71 - DNA, 3150 bp, Homo sapiens
ccacaaagggcacttggccccagggctaggagagcgaggggagagcacagccacccgcctcggcggcccgggactcggctcgactcgccggagaatgcgcccgaggacgacggggcgccagagccgcggtgctttcaactggcgagcgcgaatgggggtgcactggagtaaggcagagtgatgcgggggggcaactcgcctggcaccgagatcgccgccgtgcccttccctggacccggcgtcgcccaggatggctgccccgagccatgggccgcggcggagctagcgcggagcgcccgaccctcgacccccgagtcccggagccggccccgcgcggggccacgcgtccctcgggcgctggttcctaaggaggacgacagcaccagcttctcctttctcccttcccttccctgccccgcactcctccccctgctcgctgttgttgtgtgtcagcacttggctggggacttcttgaacttgcagggagaataacttgcgcaccccactttgcgccggtgcctttgccccagcggagcctgcttcgccatctccgagccccaccgcccctccactcctcggccttgcccgacactgagacgctgttcccagcgtgaaaagagagactgcgcggccggcacccgggagaaggaggaggcaaagaaaaggaacggacattcggtccttgcgccaggtcctttgaccagagtttttccatgtggacgctctttcaatggacgtgtccccgcgtgcttcttagacggactgcggtctcctaaaggtcgaccatggtggccgggacccgctgtcttctagcgttgctgcttccccaggtcctcctgggcggcgcggctggcctcgttccggagctgggccgcaggaagttcgcggcggcgtcgtcgggccgcccctcatcccagccctctgacgaggtcctgagcgagttcgagttgcggctgctcagcatgttcggcctgaaacagagacccacccccagcagggacgccgtggtgcccccctacatgctagacctgtatcgcaggcactcaggtcagccgggctcacccgccccagaccaccggttggagagggcagccagccgagccaacactgtgcgcagcttccaccatgaagaatctttggaagaactaccagaaacgagtgggaaaacaacccggagattcttctttaatttaagttctatccccacggaggagtttatcacctcagcagagcttcaggttttccgagaacagatgcaagatgctttaggaaacaatagcagtttccatcaccgaattaatatttatgaaatcataaaacctgcaacagccaactcgaaattccccgtgaccagacttttggacaccaggttggtgaatcagaatgcaagcaggtgggaaagttttgatgtcacccccgctgtgatgcggtggactgcacagggacacgccaaccatggattcgtggtggaagtggcccacttggaggagaaacaaggtgtctccaagagacatgttaggataagcaggtctttgcaccaagatgaacacagctggtcacagataaggccattgctagtaacttttggccatgatggaaaagggcatcctctccacaaaagagaaaaacgtcaagccaaacacaaacagcggaaacgccttaagtccagctgtaagagacaccctttgtacgtggacttcagtgacgtggggtggaatgactggattgtggctcccccggggtatcacgccttttactgccacggagaatgcccttttcctctggctgatcatctgaactccactaatcatgccattgttcagacgttggtcaactctgttaactctaagattcctaaggcatgctgtgtcccgacagaactcagtgctatctcgatgctgtaccttgacgagaatgaaaaggttgtattaaagaactatcaggacatggttgtggagggttgtgggtgtcgctagtacagcaaaattaaatacataaatatatatatatatatatattttagaaaaaagaaaaaaacaaacaaacaaaaaaaccccaccccagttgacactttaatatttcccaatgaagactttatttatggaatggaatggaaaaaaaaacagctattttgaaaatatatttatatctacgaaaagaagttgggaaaacaaatattttaatcagagaattattccttaaagatttaaaatgtatttagttgtacattttatatgggttcaaccccagcacatgaagtataatggtcagatttattttgtatttatttactattataaccactttttaggaaaaaaatagctaatttgtatttatatgtaatcaaaagaagtatcgggtttgtacataattttccaaaaattgtagttgttttcagttgtgtgtatttaagatgaaaagtctacatggaaggttactctggcaaagtgcttagcacgtttgcttttttgcagtgctactgttgagttcacaagttcaagtccagaaaaaaaaagtggataatccactctgctgactttcaagattattatattattcaattctcaggaatgttgcagagtgattgtccaatccatgagaatttacatccttattaggtggaatatttggataagaaccagacattgctgatctattatagaaactctcctcctgccccttaatttacagaaagaataaagcaggatccatagaaataattaggaaaacgatgaacctgcaggaaagtgaatgatggtttgttgttcttctttcctaaattagtgatcccttcaaaggggctgatctggccaaagtattcaataaaacgtaagatttcttcattattgatattgtggtcatatatatttaaaattgatatctcgtggccctcatcaagggttggaaatttatttgtgttttacctttacctcatctgagagctctttattctccaaagaacccagttttctaactttttgcccaacacgcagcaaaattatgcacatcgtgttttctgcccaccctctgttctctgacctatcagcttgcttttctttccaaggttgtgtgtttgaacacatttctccaaatgttaaacctatttcagataataaatatcaaatctctggcatttcattctataaagtc

SEQ ID NO: 72 - DNA, 5927 bp, Homo sapiens
tcgtcggagcagacgggagtttctcctcggggtcggagcaggaggcacgcggagtgtgaggccacgcatgagcggacgctaaccccctccccagccacaaagagtctacatgtctagggtctagacatgttcagctttgtggacctccggctcctgctcctcttagcggccaccgccctcctgacgcacggccaagaggaaggccaagtcgagggccaagacgaagacatcccaccaatcacctgcgtacagaacggcctcaggtaccatgaccgagacgtgtggaaacccgagccctgccggatctgcgtctgcgacaacggcaaggtgttgtgcgatgacgtgatctgtgacgagaccaagaactgccccggcgccgaagtccccgagggcgagtgctgtcccgtctgccccgacggctcagagtcacccaccgaccaagaaaccaccggcgtcgagggacccaagggagacactggcccccgaggcccaaggggacccgcaggcccccctggccgagatggcatccctggacagcctggacttcccggaccccccggaccccccggacctcccggaccccctggcctcggaggaaactttgctccccagctgtcttatggctatgatgagaaatcaaccggaggaatttccgtgcctggccccatgggtccctctggtcctcgtggtctccctggcccccctggtgcacctggtccccaaggcttccaaggtccccctggtgagcctggcgagcctggagcttcaggtcccatgggtccccgaggtcccccaggtccccctggaaagaatggagatgatggggaagctggaaaacctggtcgtcctggtgagcgtgggcctcctgggcctcagggtgctcgaggattgcccggaacagctggcctccctggaatgaagggacacagaggtttcagtggtttggatggtgccaagggagatgctggtcctgctggtcctaagggtgagcctggcagccctggtgaaaatggagctcctggtcagatgggcccccgtggcctgcctggtgagagaggtcgccctggagcccctggccctgctggtgctcgtggaaatgatggtgctactggtgctgccgggccccctggtcccaccggccccgctggtcctcctggcttccctggtgctgttggtgctaagggtgaagctggtccccaagggccccgaggctctgaaggtccccagggtgtgcgtggtgagcctggcccccctggccctgctggtgctgctggccctgctggaaaccctggtgctgatggacagcctggtgctaaaggtgccaatggtgctcctggtattgctggtgctcctggcttccctggtgcccgaggcccctctggaccccagggccccggcggccctcctggtcccaagggtaacagcggtgaacctggtgctcctggcagcaaaggagacactggtgctaagggagagcctggccctgttggtgttcaaggaccccctggccctgctggagaggaaggaaagcgaggagctcgaggtgaacccggacccactggcctgcccggaccccctggcgagcgtggtggacctggtagccgtggtttccctggcgcagatggtgttgctggtcccaagggtcccgctggtgaacgtggttctcctggccctgctggccccaaaggatctcctggtgaagctggtcgtcccggtgaagctggtctgcctggtgccaagggtctgactggaagccctggcagccctggtcctgatggcaaaactggcccccctggtcccgccggtcaagatggtcgccccggacccccaggcccacctggtgcccgtggtcaggctggtgtgatgggattccctggacctaaaggtgctgctggagagcccggcaaggctggagagcgaggtgttcccggaccccctggcgctgtcggtcctgctggcaaagatggagaggctggagctcagggaccccctggccctgctggtcccgctggcgagagaggtgaacaaggccctgctggctcccccggattccagggtctccctggtcctgctggtcctccaggtgaagcaggcaaacctggtgaacagggtgttcctggagaccttggcgcccctggcccctctggagcaagaggcgagagaggtttccctggcgagcgtggtgtgcaaggtccccctggtcctgctggtccccgaggggccaacggtgctcccggcaacgatggtgctaagggtgatgctggtgcccctggagctcccggtagccagggcgcccctggccttcagggaatgcctggtgaacgtggtgcagctggtcttccagggcctaagggtgacagaggtgatgctggtcccaaaggtgctgatggctctcctggcaaagatggcgtccgtggtctgactggccccattggtcctcctggccctgctggtgcccctggtgacaagggtgaaagtggtcccagcggccctgctggtcccactggagctcgtggtgcccccggagaccgtggtgagcctggtccccccggccctgctggctttgctggcccccctggtgctgacggccaacctggtgctaaaggcgaacctggtgatgctggtgctaaaggcgatgctggtccccctggccctgccggacccgctggaccccctggccccattggtaatgttggtgctcctggagccaaaggtgctcgcggcagcgctggtccccctggtgctactggtttccctggtgctgctggccgagtcggtcctcctggcccctctggaaatgctggaccccctggccctcctggtcctgctggcaaagaaggcggcaaaggtccccgtggtgagactggccctgctggacgtcctggtgaagttggtccccctggtccccctggccctgctggcgagaaaggatcccctggtgctgatggtcctgctggtgctcctggtactcccgggcctcaaggtattgctggacagcgtggtgtggtcggcctgcctggtcagagaggagagagaggcttccctggtcttcctggcccctctggtgaacctggcaaacaaggtccctctggagcaagtggtgaacgtggtccccctggtcccatgggcccccctggattggctggaccccctggtgaatctggacgtgagggggctcctggtgccgaaggttcccctggacgagacggttctcctggcgccaagggtgaccgtggtgagaccggccccgctggaccccctggtgctcctggtgctcctggtgcccctggccccgttggccctgctggcaagagtggtgatcgtggtgagactggtcctgctggtcccgccggtcctgtcggccctgttggcgcccgtggccccgccggaccccaaggcccccgtggtgacaagggtgagacaggcgaacagggcgacagaggcataaagggtcaccgtggcttctctggcctccagggtccccctggccctcctggctctcctggtgaacaaggtccctctggagcctctggtcctgctggtccccgaggtccccctggctctgctggtgctcctggcaaagatggactcaacggtctccctggccccattgggccccctggtcctcgcggtcgcactggtgatgctggtcctgttggtccccccggccctcctggacctcctggtccccctggtcctcccagcgctggtttcgacttcagcttcctgccccagccacctcaagagaaggctcacgatggtggccgctactaccgggctgatgatgccaatgtggttcgtgaccgtgacctcgaggtggacaccaccctcaagagcctgagccagcagatcgagaacatccggagcccagagggcagccgcaagaaccccgcccgcacctgccgtgacctcaagatgtgccactctgactggaagagtggagagtactggattgaccccaaccaaggctgcaacctggatgccatcaaagtcttctgcaacatggagactggtgagacctgcgtgtaccccactcagcccagtgtggcccagaagaactggtacatcagcaagaaccccaaggacaagaggcatgtctggttcggcgagagcatgaccgatggattccagttcgagtatggcggccagggctccgaccctgccgatgtggccatccagctgaccttcctgcgcctgatgtccaccgaggcctcccagaacatcacctaccactgcaagaacagcgtggcctacatggaccagcagactggcaacctcaagaaggccctgctcctccagggctccaacgagatcgagatccgcgccgagggcaacagccgcttcacctacagcgtcactgtcgatggctgcacgagtcacaccggagcctggggcaagacagtgattgaatacaaaaccaccaagacctcccgcctgcccatcatcgatgtggcccccttggacgttggtgccccagaccaggaattcggcttcgacgttggccctgtctgcttcctgtaaactccctccatcccaacctggctccctcccacccaaccaactttccccccaacccggaaacagacaagcaacccaaactgaaccccctcaaaagccaaaaaatgggagacaatttcacatggactttggaaaatatttttttcctttgcattcatctctcaaacttagtttttatctttgaccaaccgaacatgaccaaaaaccaaaagtgcattcaaccttaccaaaaaaaaaaaaaaaaaaagaataaataaataactttttaaaaaaggaagcttggtccacttgcttgaagacccatgcgggggtaagtccctttctgcccgttgggcttatgaaaccccaatgctgccctttctgctcctttctccacaccccccttggggcctcccctccactccttcccaaatctgtctccccagaagacacaggaaacaatgtattgtctgcccagcaatcaaaggcaatgctcaaacacccaagtggcccccaccctcagcccgctcctgcccgcccagcacccccaggccctgggggacctggggttctcagactgccaaagaagccttgccatctggcgctcccatggctcttgcaacatctccccttcgtttttgagggggtcatgccgggggagccaccagcccctcactgggttcggaggagagtcaggaagggccacgacaaagcagaaacatcggatttggggaacgcgtgtcaatcccttgtgccgcagggctgggcgggagagactgttctgttccttgtgtaactgtgttgctgaaagactacctcgttcttgtcttgatgtgtcaccggggcaactgcctgggggcggggatgggggcagggtggaagcggctccccattttataccaaaggtgctacatctatgtgatgggtggggtggggagggaatcactggtgctatagaaattgagatgcccccccaggccagcaaatgttcctttttgttcaaagtctatttttattccttgatatttttctttttttttttttttttttgtggatggggacttgtgaatttttctaaaggtgctatttaacatgggaggagagcgtgtgcggctccagcccagcccgctgctcactttccaccctctctccacctgcctctggcttctcaggcctctgctctccgacctctctcctctgaaaccctcctccacagctgcagcccatcctcccggctccctcctagtctgtcctgcgtcctctgtccccgggtttcagagacaacttcccaaagcacaaagcagtttttccccctaggggtgggaggaagcaaaagactctgtacctattttgtatgtgtataataatttgagatgtttttaattattttgattgctggaataaagcatgtggaaatgacccaaacataa

SEQ ID NO: 73 - DNA, 2161 bp, Homo sapiens
gcgacggttaaacggggcccaaggcaggggtggcgggtcagtgctgctcgggggcttctccatccaggtccctggagttcctggtccctggagctccgcacttggcggcgcaacctgcgtgaggcagcgcgactctggcgactggccggccatgccttcccgggctgaggactatgaagtgttgtacaccattggcacaggctcctacggccgctgccagaagatccggaggaagagtgatggcaagatattagtttggaaagaacttgactatggctccatgacagaagctgagaaacagatgcttgtttctgaagtgaatttgcttcgtgaactgaaacatccaaacatcgttcgttactatgatcggattattgaccggaccaatacaacactgtacattgtaatggaatattgtgaaggaggggatctggctagtgtaattacaaagggaaccaaggaaaggcaatacttagatgaagagtttgttcttcgagtgatgactcagttgactctggccctgaaggaatgccacagacgaagtgatggtggtcataccgtattgcatcgggatctgaaaccagccaatgttttcctggatggcaagcaaaacgtcaagcttggagactttgggctagctagaatattaaaccatgacacgagttttgcaaaaacatttgttggcacaccttattacatgtctcctgaacaaatgaatcgcatgtcctacaatgagaaatcagatatctggtcattgggctgcttgctgtatgagttatgtgcattaatgcctccatttacagcttttagccagaaagaactcgctgggaaaatcagagaaggcaaattcaggcgaattccataccgttactctgatgaattgaatgaaattattacgaggatgttaaacttaaaggattaccatcgaccttctgttgaagaaattcttgagaaccctttaatagcagatttggttgcagacgagcaaagaagaaatcttgagagaagagggcgacaattaggagagccagaaaaatcgcaggattccagccctgtattgagtgagctgaaactgaaggaaattcagttacaggagcgagagcgagctctcaaagcaagagaagaaagattggagcagaaagaacaggagctttgtgttcgtgagagactagcagaggacaaactggctagagcagaaaatctgttgaagaactacagcttgctaaaggaacggaagttcctgtctctggcaagtaatccagaacttcttaatcttccatcctcagtaattaagaagaaagttcatttcagtggggaaagtaaagagaacatcatgaggagtgagaattctgagagtcagctcacatctaagtccaagtgcaaggacctgaagaaaaggcttcacgctgcccagctgcgggctcaagccctgtcagatattgagaaaaattaccaactgaaaagcagacagatcctgggcatgcgctagccaggtagagagacacagagctgtgtacaggatgtaatattaccaacctttaaagactgatattcaaatgctgtagtgttgaatacttggttccatgagccatgcctttctgtatagtacacatgatatttcggaattggttttactgttcttcagcaactattgtacaaaatgttcacatttaatttttctttcttcttttaagaacatattataaaaagaatactttcttggttgggcttttaatcctgtgtgtgattactagtaggaacatgagatgtgacattctaaatcttgggagaaaaaataatgttaggaaaaaaatatttatgcaggaagagtagcactcactgaatagttttaaatgactgagtggtatgcttacaattgtcatgtctagatttaaattttaagtctgagattttaaatgtttttgagcttagaaaacccagttagatgcaatttggtcattaataccatgacatcttgcttataaatattccattgctctgtagttcaaatctgttagctttgtgaaaattcatcactgtgatgtttgtattctttttttttttctgtttaacagaatatgagctgtctgtcatttacctacttctttcccactaaataaaagaattcttcagtttccctgtaaaaaaaaaaaaaaaaaaa

SEQ ID NO: 74 - DNA, 2993 bp, Homo sapiens
agcaaaccaatcgcaagcctcgttgagtggaaggggtgggatcttccccggaagtgttggttaaagcccctccaatcagcggctcggtgcggcaagtttgaatttcgtggaggctcgggttgtgagggttcctgcttcggagtcggcggtggtcgtccagaccgagtgttctttactttttgtttggttgaggtttcacgctagaaggtggctcaggatgtcttcatcacattttgccagtcgacacaggaaggatataagtactgaaatgattagaactaaaattgctcataggaaatcactgtctcagaaagaaaatagacataaggaatacgaacgaaatagacactttggtttgaaagatgtaaacattccaaccttggaaggtagaattcttgttgaattagatgagacatctcaagggcttgttccagaaaagaccaatgttaagccaagggcaatgaaaactattctaggtgatcaacgaaaacagatgctccaaaaatacaaagaagaaaagcaacttcaaaaattgaaagagcagagagagaaagctaaacgaggaatatttaaagtgggtcgttatagacctgatatgccttgttttcttttatcaaaccagaatgctgtgaaagctgagccaaaaaaggctattccatcttctgtacggattacaaggtcaaaggccaaagaccaaatggagcagactaagattgataacgagagtgatgttcgagcaatccgacctggtccaagacaaacttctgaaaagaaagtgtcagacaaagagaaaaaagttgtgcagcctgtaatgcccacgtcgttgagaatgactcgatcagctactcaagcagcaaagcaggttcccagaacagtctcatctaccacagcaagaaagccagtcacaagagctgctaatgaaaacgaaccagaaggaaaggtgccaagtaaaggaagacctgccaaaaatgtagaaacaaaacccgacaagggtatttcttgtaaagtcgatagtgaagaaaatactttgaattcacaaactaatgcaacaagtggaatgaatccagatggagtcttatcaaaaatggaaaacttacctgagataaatactgcaaaaataaaagggaagaattcctttgcacctaaggattttatgtttcagccactggatggtctgaagacctatcaagtaacacctatgactcccagaagtgccaatgcttttttgacacccagttacacctggactcctttaaaaacagaagttgatgagtctcaagcaacaaaagaaattttggcacaaaaatgtaaaacttactctaccaagacaatacagcaagattcaaataaattgccatgtcctttgggtcctctaactgtttggcatgaagaacatgttttaaataaaaatgaagctactactaaaaatttaaatggccttccaataaaagaagtcccatcacttgaaagaaatgaaggtcgaattgctcagccccaccatggtgtgccatatttcagaaatatcctccagtcagaaactgagaaattaacttcacattgcttcgagtgggacaggaaacttgaattggacattccagatgatgctaaagatcttattcgcacagcagttggtcaaacaagactccttatgaaggaaaggtttaaacagtttgaaggactggttgatgattgtgaatataaacgaggtataaaggagactacctgtacagatctggatggattttgggatatggttagttttcagatagaagatgtaatccacaaattcaacaatctgatcaaacttgaggaatctgggtggcaagtcaataataatatgaatcataatatgaacaaaaatgtctttaggaaaaaagttgtctcaggtatagcaagtaaaccaaaacaggatgatgctggaagaattgcagcgagaaatcgcctagctgccataaaaaatgcaatgagagagagaattaggcaggaagaatgtgctgaaacagcagtttctgtgataccaaaggaagttgataaaatagtgttcgatgctggatttttcagagttgaaagtcctgttaaattattctcaggactttctgtctcttctgaaggcccttctcaaagacttggaacacctaagtctgtcaacaaagctgtatctcagagtagaaatgagatgggcattccacaacaaactacatcaccagaaaatgccggtcctcagaatacgaaaagtgaacatgtgaagaagactttgtttttgagtattcctgaaagcaggagcagcatagaagatgctcagtgtcctggattaccagatttaattgaagaaaatcatgttgtaaataagacagacttgaaggtggattgtttatccagtgagagaatgagtttgcctcttcttgctggtggagtagcagatgatattaatactaacaaaaaagaaggaatttcagatgttgtggaaggaatggaactgaattcttcaattacatcacaggatgttttgatgagtagccctgaaaaaaatacagcttcacaaaatagcatcttagaagaaggggaaactaaaatttctcagtcagaactatttgataataaaagtctcactactgaatgccaccttcttgattcaccaggtctaaactgcagtaatccatttactcagctggagaggagacatcaagaacatgccagacacatttcttttggtggtaacctgattactttttcacctctacaaccaggagaattttgaatttaaaaataaatccaaacattttccttcatattatcaatgcttatatattccttagactattgaaattttggagaaaatgtatttgtgttcacttctatagcatataatgttttaatattctgtgttcatcaaagtgtattttagatatactctttctcaagggaagtggggatattttgtacattttcaacacagaataaaaaatgtactgtgccttgcctctcttgtttaa

SEQ ID NO: 75 - DNA, 3527 bp, Homo sapiens
actgaaagctccggtgccagaccccacccccggccccggcccgggaccccctcccctcccgggatcccccggggttcccaccccgcccgcaccgccggggacccggccggtccggcgcgagcccccgtccggggccctggctcggcccccaggttggaggagcccggagcccgccttcggagctacggcctaacggcggcggcgactgcagtctggagggtccacacttgtgattctcaatggagagtgaaaacgcagattcataatgaaaactagcccccgtcggccactgattctcaaaagacggaggctgccccttcctgttcaaaatgccccaagtgaaacatcagaggaggaacctaagagatcccctgcccaacaggagtctaatcaagcagaggcctccaaggaagtggcagagtccaactcttgcaagtttccagctgggatcaagattattaaccaccccaccatgcccaacacgcaagtagtggccatccccaacaatgctaatattcacagcatcatcacagcactgactgccaagggaaaagagagtggcagtagtgggcccaacaaattcatcctcatcagctgtgggggagccccaactcagcctccaggactccggcctcaaacccaaaccagctatgatgccaaaaggacagaagtgaccctggagaccttgggaccaaaacctgcagctagggatgtgaatcttcctagaccacctggagccctttgcgagcagaaacgggagacctgtgcagatggtgaggcagcaggctgcactatcaacaatagcctatccaacatccagtggcttcgaaagatgagttctgatggactgggctcccgcagcatcaagcaagagatggaggaaaaggagaattgtcacctggagcagcgacaggttaaggttgaggagccttcgagaccatcagcgtcctggcagaactctgtgtctgagcggccaccctactcttacatggccatgatacaattcgccatcaacagcactgagaggaagcgcatgactttgaaagacatctatacgtggattgaggaccactttccctactttaagcacattgccaagccaggctggaagaactccatccgccacaacctttccctgcacgacatgtttgtccgggagacgtctgccaatggcaaggtctccttctggaccattcaccccagtgccaaccgctacttgacattggaccaggtgtttaagccactggacccagggtctccacaattgcccgagcacttggaatcacagcagaaacgaccgaatccagagctccgccggaacatgaccatcaaaaccgaactccccctgggcgcacggcggaagatgaagccactgctaccacgggtcagctcatacctggtacctatccagttcccggtgaaccagtcactggtgttgcagccctcggtgaaggtgccattgcccctggcggcttccctcatgagctcagagcttgcccgccatagcaagcgagtccgcattgcccccaaggtgctgctagctgaggaggggatagctcctctttcttctgcaggaccagggaaagaggagaaactcctgtttggagaagggttttctcctttgcttccagttcagactatcaaggaggaagaaatccagcctggggaggaaatgccacacttagcgagacccatcaaagtggagagccctcccttggaagagtggccctccccggccccatctttcaaagaggaatcatctcactcctgggaggattcgtcccaatctcccaccccaagacccaagaagtcctacagtgggcttaggtccccaacccggtgtgtctcggaaatgcttgtgattcaacacagggagaggagggagaggagccggtctcggaggaaacagcatctactgcctccctgtgtggatgagccggagctgctcttctcagaggggcccagtacttcccgctgggccgcagagctcccgttcccagcagactcctctgaccctgcctcccagctcagctactcccaggaagtgggaggaccttttaagacacccattaaggaaacgctgcccatctcctccaccccgagcaaatctgtcctccccagaacccctgaatcctggaggctcacgcccccagccaaagtagggggactggatttcagcccagtacaaacctcccagggtgcctctgaccccttgcctgaccccctggggctgatggatctcagcaccactcccttgcaaagtgctcccccccttgaatcaccgcaaaggctcctcagttcagaacccttagacctcatctccgtcccctttggcaactcttctccctcagatatagacgtccccaagccaggctccccggagccacaggtttctggccttgcagccaatcgttctctgacagaaggcctggtcctggacacaatgaatgacagcctcagcaagatcctgctggacatcagctttcctggcctggacgaggacccactgggccctgacaacatcaactggtcccagtttattcctgagctacagtagagccctgcccttgcccctgtgctcaagctgtccaccatcccgggcactccaaggctcagtgcaccccaagcctctgagtgaggacagcaggcagggactgttctgctcctcatagctccctgctgcctgattatgcaaaagtagcagtcacaccctagccactgctgggaccttgtgttccccaagagtatctgattcctctgctgtccctgccaggagctgaagggtgggaacaacaaaggcaatggtgaaaagagattaggaaccccccagcctgtttccattctctgcccagcagtctcttaccttccctgatctttgcagggtggtccgtgtaaatagtataaattctccaaattatcctctaattataaatgtaagcttatttccttagatcattatccagagactgccagaaggtgggtaggatgacctggggtttcaattgacttctgttccttgcttttagttttgatagaagggaagacctgcagtgcacggtttcttccaggctgaggtacctggatcttgggttcttcactgcagggacccagacaagtggatctgcttgccagagtcctttttgcccctccctgccacctccccgtgtttccaagtcagctttcctgcaagaagaaatcctggttaaaaaagtcttttgtattgggtcaggagttgaatttggggtgggaggatggatgcaactgaagcagagtgtgggtgcccagatgtgcgctattagatgtttctctgataatgtccccaatcataccagggagactggcattgacgagaactcaggtggaggcttgagaaggccgaaagggcccctgacctgcctggcttccttagcttgcccctcagctttgcaaagagccaccctaggccccagctgaccgcatgggtgtgagccagcttgagaacactaactactcaataaaagcgaaggtggacaaaaaaaaaaaaaaaa

SEQ ID NO: 76 - DNA, 2537 bp, Homo sapiens
cccagaaggccgcggggggtggaccgcctaagagggcgtgcgctcccgacatgccccgcggcgcgccattaaccgccagatttgaatcgcgggacccgttggcagaggtggcggcggcggcatgggtgccccgacgttgccccctgcctggcagccctttctcaaggaccaccgcatctctacattcaagaactggcccttcttggagggctgcgcctgcaccccggagcggatggccgaggctggcttcatccactgccccactgagaacgagccagacttggcccagtgtttcttctgcttcaaggagctggaaggctgggagccagatgacgaccccatgcaaaggaaaccaacaataagaagaaagaatttgaggaaactgcggagaaagtgcgccgtgccatcgagcagctggctgccatggattgaggcctctggccggagctgcctggtcccagagtggctgcaccacttccagggtttattccctggtgccaccagccttcctgtgggccccttagcaatgtcttaggaaaggagatcaacattttcaaattagatgtttcaactgtgctcttgttttgtcttgaaagtggcaccagaggtgcttctgcctgtgcagcgggtgctgctggtaacagtggctgcttctctctctctctctcttttttgggggctcatttttgctgttttgattcccgggcttaccaggtgagaagtgagggaggaagaaggcagtgtcccttttgctagagctgacagctttgttcgcgtgggcagagccttccacagtgaatgtgtctggacctcatgttgttgaggctgtcacagtcctgagtgtggacttggcaggtgcctgttgaatctgagctgcaggttccttatctgtcacacctgtgcctcctcagaggacagtttttttgttgttgtgtttttttgtttttttttttttggtagatgcatgacttgtgtgtgatgagagaatggagacagagtccctggctcctctactgtttaacaacatggctttcttattttgtttgaattgttaattcacagaatagcacaaactacaattaaaactaagcacaaagccattctaagtcattggggaaacggggtgaacttcaggtggatgaggagacagaatagagtgataggaagcgtctggcagatactccttttgccactgctgtgtgattagacaggcccagtgagccgcggggcacatgctggccgctcctccctcagaaaaaggcagtggcctaaatcctttttaaatgacttggctcgatgctgtgggggactggctgggctgctgcaggccgtgtgtctgtcagcccaaccttcacatctgtcacgttctccacacgggggagagacgcagtccgcccaggtccccgctttctttggaggcagcagctcccgcagggctgaagtctggcgtaagatgatggatttgattcgccctcctccctgtcatagagctgcagggtggattgttacagcttcgctggaaacctctggaggtcatctcggctgttcctgagaaataaaaagcctgtcatttcaaacactgctgtggaccctactgggtttttaaaatattgtcagtttttcatcgtcgtccctagcctgccaacagccatctgcccagacagccgcagtgaggatgagcgtcctggcagagacgcagttgtctctgggcgcttgccagagccacgaaccccagacctgtttgtatcatccgggctccttccgggcagaaacaactgaaaatgcacttcagacccacttatttctgccacatctgagtcggcctgagatagacttttccctctaaactgggagaatatcacagtggtttttgttagcagaaaatgcactccagcctctgtactcatctaagctgcttatttttgatatttgtgtcagtctgtaaatggatacttcactttaataactgttgcttagtaattggctttgtagagaagctggaaaaaaatggttttgtcttcaactcctttgcatgccaggcggtgatgtggatctcggcttctgtgagcctgtgctgtgggcagggctgagctggagccgcccctctcagcccgcctgccacggcctttccttaaaggccatccttaaaaccagaccctcatggctaccagcacctgaaagcttcctcgacatctgttaataaagccgtaggcccttgtctaagtgcaaccgcctagactttctttcagatacatgtccacatgtccatttttcaggttctctaagttggagtggagtctgggaagggttgtgaatgaggcttctgggctatgggtgaggttccaatggcaggttagagcccctcgggccaactgccatcctggaaagtagagacagcagtgcccgctgcccagaagagaccagcaagccaaactggagcccccattgcaggctgtcgccatgtggaaagagtaactcacaattgccaataaagtctcatgtggttttatctaaaaaaaaaaaaaaaaaaaaaaaaa

SEQ ID NO: 77 - DNA, 2204 bp, Homo sapiens
gagcggtgcggaggctctgctcggatcgaggtctgcagcgcagcttcgggagcatgagtgctgcagtgactgcagggaagctggcacgggcaccggccgaccctgggaaagccggggtccccggagttgcagctcccggagctccggcggcggctccaccggcgaaagagatcccggaggtcctagtggacccacgcagccggcggcgctatgtgcggggccgctttttgggcaagggcggctttgccaagtgcttcgagatctcggacgcggacaccaaggaggtgttcgcgggcaagattgtgcctaagtctctgctgctcaagccgcaccagagggagaagatgtccatggaaatatccattcaccgcagcctcgcccaccagcacgtcgtaggattccacggctttttcgaggacaacgacttcgtgttcgtggtgttggagctctgccgccggaggtctctcctggagctgcacaagaggaggaaagccctgactgagcctgaggcccgatactacctacggcaaattgtgcttggctgccagtacctgcaccgaaaccgagttattcatcgagacctcaagctgggcaaccttttcctgaatgaagatctggaggtgaaaataggggattttggactggcaaccaaagtcgaatatgacggggagaggaagaagaccctgtgtgggactcctaattacatagctcccgaggtgctgagcaagaaagggcacagtttcgaggtggatgtgtggtccattgggtgtatcatgtataccttgttagtgggcaaaccaccttttgagacttcttgcctaaaagagacctacctccggatcaagaagaatgaatacagtattcccaagcacatcaaccccgtggccgcctccctcatccagaagatgcttcagacagatcccactgcccgcccaaccattaacgagctgcttaatgacgagttctttacttctggctatatccctgcccgtctccccatcacctgcctgaccattccaccaaggttttcgattgctcccagcagcctggaccccagcaaccggaagcccctcacagtcctcaataaaggcttggagaaccccctgcctgagcgtccccgggaaaaagaagaaccagtggttcgagagacaggtgaggtggtcgactgccacctcagtgacatgctgcagcagctgcacagtgtcaatgcctccaagccctcggagcgtgggctggtcaggcaagaggaggctgaggatcctgcctgcatccccatcttctgggtcagcaagtgggtggactattcggacaagtacggccttgggtatcagctctgtgataacagcgtgggggtgctcttcaatgactcaacacgcctcatcctctacaatgatggtgacagcctgcagtacatagagcgtgacggcactgagtcctacctcaccgtgagttcccatcccaactccttgatgaagaagatcaccctccttaaatatttccgcaattacatgagcgagcacttgctgaaggcaggtgccaacatcacgccgcgcgaaggtgatgagctcgcccggctgccctacctacggacctggttccgcacccgcagcgccatcatcctgcacctcagcaacggcagcgtgcagatcaacttcttccaggatcacaccaagctcatcttgtgcccactgatggcagccgtgacctacatcgacgagaagcgggacttccgcacataccgcctgagtctcctggaggagtacggctgctgcaaggagctggccagccggctccgctacgcccgcactatggtggacaagctgctgagctcacgctcggccagcaaccgtctcaaggcctcctaatagctgccctcccctccggactggtgccctcctcactcccacctgcatctggggcccatactggttggctcccgcggtgccatgtctgcagtgtgccccccagccccggtggctgggcagagctgcatcatccttgcaggtgggggttgctgtgtaagttatttttgtacatgttcgggtgtgggttctacagccttgtccccctccccctcaaccccaccatatgaattgtacagaatatttctattgaattcggaactgtcctttccttggctttatgcacattaaacagatgtgaatattcaaaaaaaaaaaaaaaaaaaaaaaaaaaaaaaaaaa

SEQ ID NO: 78 - DNA, 1116 bp, Homo sapiens
cgtgggatgttagcggtgggggcaatggagggcacccggcagagcgcattcctgctcagcagccctcccctggccgccctgcacagcatggccgagatgaagaccccgctgtaccctgccgcgtatcccccgctgcctgccggccccccctcctcctcgtcctcgtcgtcgtcctcctcgtcgccctccccgcctctgggcacccacaacccaggcggcctgaagcccccggccacgggggggctctcatccctcggcagccccccgcagcagctctcggccgccaccccacacggcatcaacgatatcctgagccggccctccatgcccgtggcctcgggggccgccctgccctccgcctcgccctccggttcctcctcctcctcttcctcgtccgcctctgcctcctccgcctctgccgccgccgcggctgctgccgcggccgcagccgccgcctcatccccggcggggctgctggccggactgccacgctttagcagcctgagcccgccgccgccgccgcccgggctctacttcagccccagcgccgcggccgtggccgccgtgggccggtaccccaagccgctggctgagctgcctggccggacgcccatcttctggcccggagtgatgcagagcccgccctggagggacgcacgcctggcctgtacccctcatcaaggatccattttgttggacaaagacgggaagagaaaacacacgagacccactttttccggacagcagatcttcgccctggagaagactttcgaacaaacaaaatacttggcggggcccgagagggctcgtttggcctattcgttggggatgacagagagtcaggtcaaggtctggttccagaaccgccggaccaagtggaggaagaagcacgctgccgagatggccacggccaagaagaagcaggactcggagacagagcgcctcaagggggcctcggagaacgaggaagaggacgacgactacaataagcctctggatcccaactcggacgacgagaaaatcacgcagctgttgaagaagcacaagtccagcagcggcggcggcggcggcctcctactgcacgcgtccgagccggagagctcatcctgaacgccg

SEQ ID NO: 79 - DNA, 3689 bp, Homo sapiens
gggcgaaggtgaagaccggctcctaggatgagtgaaggggcggccgctgcctcgccacctggtgccgcttcggcagccgccgcctcggccgaggagggcaccgcggcggctgcggcggcggcagcggcgggcgggggcccggacggcggcggcgaaggggcggccgagcccccccgggagttacgctgtagcgactgcatcgtgtggaaccggcagcagacgtggctgtgcgtggtacctctgttcatcggcttcatcggcctggggctcagcctcatgcttctcaaatggatcgtggtgggctccgtcaaggagtacgtgcccaccgacctagtggactccaaggggatgggccaggaccccttcttcctctccaagcccagctctttccccaaggccatggagaccaccaccactaccacttccaccacgtcccccgccaccccctccgccgggggtgccgcctcctccaggacgcccaaccggattagcactcgcctgaccaccatcacgcgggcgcccactcgcttccccgggcaccgggtgcccatccgggccagcccgcgctccaccacagcacggaacactgcggcccctgcgacggtcccgtccaccacggccccgttcttcagtagcagcacgctgggctcccgacccccggtgccaggaactccaagtacccaggcaatgccctcctggcctactgcggcatacgctacctcctcctaccttcacgattctactccctcctggaccctgtctccctttcaggatgctgcctcctcttcttcctcttcttcctcctccgctaccaccaccacaccagaaactagcaccagccccaaatttcatacgacgacatattccacagagcgatccgagcacttcaaaccctgccgagacaaggaccttgcatactgtctcaatgatggcgagtgctttgtgatcgaaaccctgaccggatcccataaacactgtcggtgcaaagaaggctaccaaggagtccgttgtgatcaatttctgccgaaaactgattccatcttatcggatccaaaccacttggggattgaattcatggagagtgaagaagtttatcaaaggcaggtgctgtcaatttcatgtatcatctttggaattgtcatcgtgggcatgttctgtgcagcattctacttcaaaagcaagaaacaagctaaacaaatccaagagcagctgaaagtgccacaaaatggtaaaagctacagtctcaaagcatccagcacaatggcaaagtcagagaacttggtgaagagccatgtccagctgcaaaattattcaaaggtggaaaggcatcctgtgactgcattggagaaaatgatggagtcaagttttgtcggcccccagtcattccctgaggtcccttctcctgacagaggaagccagtctgtcaaacaccacaggagtctatcctcttgctgcagcccagggcaaagaagtggcatgctccataggaatgccttcagaaggacacccccgtcaccccgaagtaggctaggtggaattgtgggaccagcatatcagcaactcgaagaatcaaggatcccagaccaggatacgataccttgccaagggtattcatccagtggtttaaaaacccaacgaaatacatcaataaatatgcaactgccttcaagagagacaaacccctattttaatagcttggagcaaaaggacctggtgggctattcatccacaagggccagttctgtgcccatcatcccttcagtgggtttagaggaaacctgcctgcaaatgccagggatttctgaagtcaaaagcatcaaatggtgcaaaaactcctattcagctgacgttgtcaatgtgagtattccagtcagcgattgtcttatagcagaacaacaagaagtgaaaatattgctagaaactgtccaggagcagatccgaattctgactgatgccagacggtcagaagactacgaactggccagcgtagaaaccgaggacagtgcaagcgaaaacacagcctttctccccctgagtcccacagccaaatcagaacgagaggcgcaatttgtcttaagaaatgaaatacaaagagactctgcattgaccaagtgacttgagatgtaggaatctgtgcattctatgctttgctcaacaggaaagagaggaaatcaaatacaaattatttatatgcattaatttaagagcatctacttagaagaaaccaaatagtctatcgccctcatatcatagtgttttttaacaaaatatttttttaagggaaagaaatgtttcaggagggataaagcttaccattaaagcttttgggtagaattctgaatccaatttcgtttagtcccaacactgtcctctttggctcttagaagatgtgggcaattcagacccttggccccacagtgccagtgtctcattaaaaaacactggcagttacctggtttcaaaaagaggagagctgcatcccgcaggtggatgcaccagtgagcaggtggctcttgccatttggcttgccagtcccaagccctaaatttctattcacccaatagcctcatcacaggttatgtcatgtcgacacatgtagtgttttctatttgatttttggagaatgccacaaaagactctgcaatgggaaggaggacaggagatagaaggagaaaccgggggcaatcttaactactcttgtgtgccaccttcctctgagatttgaatgcacagatctcagctggaggtatgaaattattacagaaaaagagacaaaaaaatccttatatcgtgtcactaaaatcatgctaatagaaatgtttttccttgagattgtttagaggctctggaggagcgtttctcagtttttgtgtgcctgtgtgcacatgtgtgtgcgagcgtgtgtgtgtgtggacttgctcacgcgggcacatatgctgtaagcacatgtgttcattgtgcgtatgtgtgtgcatgtgtgcgcgtattacgcttgctaaaatttgttctgaaacatcagggaatctactattcagaaaaattatttccctcttagatcttttcactttaaatttttccattaagtataaagttcagttagttcttaaatcaaggtcacttgcatggtggggtcgtataaaactcttgacactgtctagaccattttctgatgtgaatacttttgagaggatcaactattggctcattaatgatatcagtatcataaggtgagttcatcaaggatgtgtgtttattttgaatcatgcctacttaaattattaatacaagacaattaacaaattgacagttaccatttgctttctcatcatcctcattaccatttattttatagcaagtctgctatgtgtggaccaaggcttcggcttctgtggttagtatgggaagaataaattgttgaaataaaaatacccagactattcagttcacaagaagccccccaaaagaacagtaaattgtgttgtatgttcatttggaataaagcaatatttttaccactgctaaggtgaactgaaacctctcctgaagatttgtctgtttatttaccctcactttcatgggacatatgaggaaattagtgttcacatatccagtctttttccaattattggtggtgttgagttgttatgtttacactgttttaaataaaaaggcaccgtatttgaaagcat

SEQ ID NO: 80 - DNA, 3749 bp, Homo sapiens
aggggcgtggccacgtcgaccgcgcgggaccgttaaatttgaaacttggcggctaggggtgtgggcttgaggtggccggtttgttagggagtcgtgtacgtgccttggtcgcttctgtagctccgagggcaggttgcggaagaaagcccaggcggtctgtggcccagaggaaaggcctgcagcaggacgaggacctgagccaggaatgcaggatggcggcggtgaagaaggaagggggtgctctgagtgaagccatgtccctggagggagatgaatgggaactgagtaaagaaaatgtacaacctttaaggcaagggcggatcatgtccacgcttcagggagcactggcacaagaatctgcctgtaacaatactcttcagcagcagaaacgggcatttgaatatgaaattcgattttacactggaaatgaccctctggatgtttgggataggtatatcagctggacagagcagaactatcctcaaggtgggaaggagagtaatatgtcaacgttattagaaagagctgtagaagcactacaaggagaaaaacgatattatagtgatcctcgatttctcaatctctggcttaaattagggcgtttatgcaatgagcctttggatatgtacagttacttgcacaaccaagggattggtgtttcacttgctcagttctatatctcatgggcagaagaatatgaagctagagaaaactttaggaaagcagatgcgatatttcaggaagggattcaacagaaggctgaaccactagaaagactacagtcccagcaccgacaattccaagctcgagtgtctcggcaaactctgttggcacttgagaaagaagaagaggaggaagtttttgagtcttctgtaccacaacgaagcacactagctgaactaaagagcaaagggaaaaagacagcaagagctccaatcatccgtgtaggaggtgctctcaaggctccaagccagaacagaggactccaaaatccatttcctcaacagatgcaaaataatagtagaattactgtttttgatgaaaatgctgatgaggcttctacagcagagttgtctaagcctacagtccagccatggatagcaccccccatgcccagggccaaagagaatgagctgcaagcaggcccttggaacacaggcaggtccttggaacacaggcctcgtggcaatacagcttcactgatagctgtacccgctgtgcttcccagtttcactccatatgtggaagagactgcacaacagccagttatgacaccatgtaaaattgaacctagtataaaccacatcctaagcaccagaaagcctggaaaggaagaaggagatcctctacaaagggttcagagccatcagcaagcgtctgaggagaagaaagagaagatgatgtattgtaaggagaagatttatgcaggagtaggggaattctcctttgaagaaattcgggctgaagttttccggaagaaattaaaagagcaaagggaagccgagctattgaccagtgcagagaagagagcagaaatgcagaaacagattgaagagatggagaagaagctaaaagaaatccaaactactcagcaagaaagaacaggtgatcagcaagaagagacgatgcctacaaaggagacaactaaactgcaaattgcttccgagtctcagaaaataccaggaatgactctatccagttctgtttgtcaagtaaactgttgtgccagagaaacttcacttgcggagaacatttggcaggaacaacctcattctaaaggtcccagtgtacctttctccatttttgatgagtttcttctttcagaaaagaagaataaaagtcctcctgcagatcccccacgagttttagctcaacgaagaccccttgcagttctcaaaacctcagaaagcatcacctcaaatgaagatgtgtctccagatgtttgtgatgaatttacaggaattgaacccttgagcgaggatgccattatcacaggcttcagaaatgtaacaatttgtcctaacccagaagacacttgtgactttgccagagcagctcgttttgtatccactccttttcatgagataatgtccttgaaggatctcccttctgatcctgagagactgttaccggaagaagatctagatgtaaagacctctgaggaccagcagacagcttgtggcactatctacagtcagactctcagcatcaagaagctgagcccaattattgaagacagtcgtgaagccacacactcctctggcttctctggttcttctgcctcggttgcaagcacctcctccatcaaatgtcttcaaattcctgagaaactagaacttactaatgagacttcagaaaaccctactcagtcaccatggtgttcacagtatcgcagacagctactgaagtccctaccagagttaagtgcctctgcagagttgtgtatagaagacagaccaatgcctaagttggaaattgagaaggaaattgaattaggtaatgaggattactgcattaaacgagaatacctaatatgtgaagattacaagttattctgggtggcgccaagaaactctgcagaattaacagtaataaaggtatcttctcaacctgtcccatgggacttttatatcaacctcaagttaaaggaacgtttaaatgaagattttgatcatttttgcagctgttatcaatatcaagatggctgtattgtttggcaccaatatataaactgcttcacccttcaggatcttctccaacacagtgaatatattacccatgaaataacagtgttgattatttataaccttttgacaatagtggagatgctacacaaagcagaaatagtccatggtgacttgagtccaaggtgtctgattctcagaaacagaatccacgatccctatgattgtaacaagaacaatcaagctttgaagatagtggacttttcctacagtgttgaccttagggtgcagctggatgtttttaccctcagcggctttcggactgtacagatcctggaaggacaaaagatcctggctaactgttcttctccctaccaggtagacctgtttggtatagcagatttagcacatttactattgttcaaggaacacctacaggtcttctgggatgggtccttctggaaacttagccaaaatatttctgagctaaaagatggtgaattgtggaataaattctttgtgcggattctgaatgccaatgatgaggccacagtgtctgttcttggggagcttgcagcagaaatgaatggggtttttgacactacattccaaagtcacctgaacaaagccttatggaaggtagggaagttaactagtcctggggctttgctctttcagtgagctaggcaatcaagtctcacagattgctgcctcagagcaatggttgtattgtggaacactgaaactgtatgtgctgtaatttaatttaggacacatttagatgcactaccattgctgttctactttttggtacaggtatattttgacgtcactgatattttttatacagtgatatacttactcatggccttgtctaacttttgtgaagaactattttattctaaacagactcattacaaatggttaccttgttatttaacccatttgtctctacttttccctgtacttttcccatttgtaatttgtaaaatgttctcttatgatcaccatgtattttgtaaataataaaatagtatctgttaaatttgtgcttctaaaaaaaaa

SEQ ID NO: 81 - DNA, 2151 bp, Homo sapiens
gcctctccaaaggctgcagaagtttcttgctaacaaaaagtccgcacattcgagcaaagacaggctttagcgagttattaaaaacttaggggcgctcttgtcccccacagggcccgaccgcacacagcaaggcgatggcccagctgtaagttggtagcactgagaactagcagcgcgcgcggagcccgctgagacttgaatcaatctggtctaacggtttcccctaaaccgctaggagccctcaatcggcgggacagcagggcgcgtcctctgccactctcgctccgaggtccccgcgccagagacgcagccgcgctcccaccacccacacccaccgcgccctcgttcgcctcttctccgggagccagtccgcgccaccgccgccgcccaggccatcgccaccctccgcagccatgtccaccaggtccgtgtcctcgtcctcctaccgcaggatgttcggcggcccgggcaccgcgagccggccgagctccagccggagctacgtgactacgtccacccgcacctacagcctgggcagcgcgctgcgccccagcaccagccgcagcctctacgcctcgtccccgggcggcgtgtatgccacgcgctcctctgccgtgcgcctgcggagcagcgtgcccggggtgcggctcctgcaggactcggtggacttctcgctggccgacgccatcaacaccgagttcaagaacacccgcaccaacgagaaggtggagctgcaggagctgaatgaccgcttcgccaactacatcgacaaggtgcgcttcctggagcagcagaataagatcctgctggccgagctcgagcagctcaagggccaaggcaagtcgcgcctgggggacctctacgaggaggagatgcgggagctgcgccggcaggtggaccagctaaccaacgacaaagcccgcgtcgaggtggagcgcgacaacctggccgaggacatcatgcgcctccgggagaaattgcaggaggagatgcttcagagagaggaagccgaaaacaccctgcaatctttcagacaggatgttgacaatgcgtctctggcacgtcttgaccttgaacgcaaagtggaatctttgcaagaagagattgcctttttgaagaaactccacgaagaggaaatccaggagctgcaggctcagattcaggaacagcatgtccaaatcgatgtggatgtttccaagcctgacctcacggctgccctgcgtgacgtacgtcagcaatatgaaagtgtggctgccaagaacctgcaggaggcagaagaatggtacaaatccaagtttgctgacctctctgaggctgccaaccggaacaatgacgccctgcgccaggcaaagcaggagtccactgagtaccggagacaggtgcagtccctcacctgtgaagtggatgcccttaaaggaaccaatgagtccctggaacgccagatgcgtgaaatggaagagaactttgccgttgaagctgctaactaccaagacactattggccgcctgcaggatgagattcagaatatgaaggaggaaatggctcgtcaccttcgtgaataccaagacctgctcaatgttaagatggcccttgacattgagattgccacctacaggaagctgctggaaggcgaggagagcaggatttctctgcctcttccaaacttttcctccctgaacctgagggaaactaatctggattcactccctctggttgatacccactcaaaaaggacacttctgattaagacggttgaaactagagatggacaggttatcaacgaaacttctcagcatcacgatgaccttgaataaaaattgcacacactcagtgcagcaatatattaccagcaagaataaaaaagaaatccatatcttaaagaaacagctttcaagtgcctttctgcagtttttcaggagcgcaagatagatttggaataggaataagctctagttcttaacaaccgacactcctacaagatttagaaaaaagtttacaacataatctagtttacagaaaaatcttgtgctagaatactttttaaaaggtattttgaataccattaaaactgcttttttttttccagcaagtatccaaccaacttggttctgcttcaataaatctttggaaaaactcaaaaaaaaaaaaaaa

SEQ ID NO: 82 - DNA, 7616 bp, Homo sapiens
attacagaggaaggagctcgctatataagccagccaaagttggctgcaccggccacagcctgcctactgtcacccgcctctcccgcgcgcagatacacgcccccgcctccgtgggcacaaaggcagcgctgctggggaactcgggggaacgcgcacgtgggaaccgccgcagctccacactccaggtacttcttccaaggacctaggtctctcgcccatcggaaagaaaataattctttcaagaagatcagggacaactgatttgaagtctactctgtgcttctaaatccccaattctgctgaaagtgagataccctagagccctagagccccagcagcacccagccaaacccacctccaccatgggggccatgactcagctgttggcaggtgtctttcttgctttccttgccctcgctaccgaaggtggggtcctcaagaaagtcatccggcacaagcgacagagtggggtgaacgccaccctgccagaagagaaccagccagtggtgtttaaccacgtttacaacatcaagctgccagtgggatcccagtgttcggtggatctggagtcagccagtggggagaaagacctggcaccgccttcagagcccagcgaaagctttcaggagcacacagtggatggggaaaaccagattgtcttcacacatcgcatcaacatcccccgccgggcctgtggctgtgccgcagcccctgatgttaaggagctgctgagcagactggaggagctggagaacctggtgtcttccctgagggagcaatgtactgcaggagcaggctgctgtctccagcctgccacaggccgcttggacaccaggcccttctgtagcggtcggggcaacttcagcactgaaggatgtggctgtgtctgcgaacctggctggaaaggccccaactgctctgagcccgaatgtccaggcaactgtcaccttcgaggccggtgcattgatgggcagtgcatctgtgacgacggcttcacgggcgaggactgcagccagctggcttgccccagcgactgcaatgaccagggcaagtgcgtaaatggagtctgcatctgtttcgaaggctacgccggggctgactgcagccgtgaaatctgcccagtgccctgcagtgaggagcacggcacatgtgtagatggcttgtgtgtgtgccacgatggctttgcaggcgatgactgcaacaagcctctgtgtctcaacaattgctacaaccgtggacgatgcgtggagaatgagtgcgtgtgtgatgagggtttcacgggcgaagactgcagtgagctcatctgccccaatgactgcttcgaccggggccgctgcatcaatggcacctgctactgcgaagaaggcttcacaggtgaagactgcgggaaacccacctgcccacatgcctgccacacccagggccggtgtgaggaggggcagtgtgtatgtgatgagggctttgccggtgtggactgcagcgagaagaggtgtcctgctgactgtcacaatcgtggccgctgtgtagacgggcggtgtgagtgtgatgatggtttcactggagctgactgtggggagctcaagtgtcccaatggctgcagtggccatggccgctgtgtcaatgggcagtgtgtgtgtgatgagggctatactggggaggactgcagccagctacggtgccccaatgactgtcacagtcggggccgctgtgtcgagggcaaatgtgtatgtgagcaaggcttcaagggctatgactgcagtgacatgagctgccctaatgactgtcaccagcacggccgctgtgtgaatggcatgtgtgtttgtgatgacggctacacaggggaagactgccgggatcgccaatgccccagggactgcagcaacaggggcctctgtgtggacggacagtgcgtctgtgaggacggcttcaccggccctgactgtgcagaactctcctgtccaaatgactgccatggccagggtcgctgtgtgaatgggcagtgcgtgtgccatgaaggatttatgggcaaagactgcaaggagcaaagatgtcccagtgactgtcatggccagggccgctgcgtggacggccagtgcatctgccacgagggcttcacaggcctggactgtggccagcactcctgccccagtgactgcaacaacttaggacaatgcgtctcgggccgctgcatctgcaacgagggctacagcggagaagactgctcagaggtgtctcctcccaaagacctcgttgtgacagaagtgacggaagagacggtcaacctggcctgggacaatgagatgcgggtcacagagtaccttgtcgtgtacacgcccacccacgagggtggtctggaaatgcagttccgtgtgcctggggaccagacgtccaccatcatccaggagctggagcctggtgtggagtactttatccgtgtatttgccatcctggagaacaagaagagcattcctgtcagcgccagggtggccacgtacttacctgcacctgaaggcctgaaattcaagtccatcaaggagacatctgtggaagtggagtgggatcctctagacattgcttttgaaacctgggagatcatcttccggaatatgaataaagaagatgagggagagatcaccaaaagcctgaggaggccagagacctcttaccggcaaactggtctagctcctgggcaagagtatgagatatctctgcacatagtgaaaaacaatacccggggccctggcctgaagagggtgaccaccacacgcttggatgcccccagccagatcgaggtgaaagatgtcacagacaccactgccttgatcacctggttcaagcccctggctgagatcgatggcattgagctgacctacggcatcaaagacgtgccaggagaccgtaccaccatcgatctcacagaggacgagaaccagtactccatcgggaacctgaagcctgacactgagtacgaggtgtccctcatctcccgcagaggtgacatgtcaagcaacccagccaaagagaccttcacaacaggcctcgatgctcccaggaatcttcgacgtgtttcccagacagataacagcatcaccctggaatggaggaatggcaaggcagctattgacagttacagaattaagtatgcccccatctctggaggggaccacgctgaggttgatgttccaaagagccaacaagccacaaccaaaaccacactcacaggtctgaggccgggaactgaatatgggattggagtttctgctgtgaaggaagacaaggagagcaatccagcgaccatcaacgcagccacagagttggacacgcccaaggaccttcaggtttctgaaactgcagagaccagcctgaccctgctctggaagacaccgttggccaaatttgaccgctaccgcctcaattacagtctccccacaggccagtgggtgggagtgcagcttccaagaaacaccacttcctatgtcctgagaggcctggaaccaggacaggagtacaatgtcctcctgacagccgagaaaggcagacacaagagcaagcccgcacgtgtgaaggcatccactgaacaagcccctgagctggaaaacctcaccgtgactgaggttggctgggatggcctcagactcaactggaccgcagctgaccaggcctatgagcactttatcattcaggtgcaggaggccaacaaggtggaggcagctcggaacctcaccgtgcctggcagccttcgggctgtggacataccgggcctcaaggctgctacgccttatacagtctccatctatggggtgatccagggctatagaacaccagtgctctctgctgaggcctccacaggggaaactcccaatttgggagaggtcgtggtggccgaggtgggctgggatgccctcaaactcaactggactgctccagaaggggcctatgagtactttttcattcaggtgcaggaggctgacacagtagaggcagcccagaacctcaccgtcccaggaggactgaggtccacagacctgcctgggctcaaagcagccactcattataccatcaccatccgcggggtcactcaggacttcagcacaacccctctctctgttgaagtcttgacagaggaggttccagatatgggaaacctcacagtgaccgaggttagctgggatgctctcagactgaactggaccacgccagatggaacctatgaccagtttactattcaggtccaggaggctgaccaggtggaagaggctcacaatctcacggttcctggcagcctgcgttccatggaaatcccaggcctcagggctggcactccttacacagtcaccctgcacggcgaggtcaggggccacagcactcgaccccttgctgtagaggtcgtcacagaggatctcccacagctgggagatttagccgtgtctgaggttggctgggatggcctcagactcaactggaccgcagctgacaatgcctatgagcactttgtcattcaggtgcaggaggtcaacaaagtggaggcagcccagaacctcacgttgcctggcagcctcagggctgtggacatcccgggcctcgaggctgccacgccttatagagtctccatctatggggtgatccggggctatagaacaccagtactctctgctgaggcctccacagccaaagaacctgaaattggaaacttaaatgtttctgacataactcccgagagcttcaatctctcctggatggctaccgatgggatcttcgagacctttaccattgaaattattgattccaataggttgctggagactgtggaatataatatctctggtgctgaacgaactgcccatatctcagggctaccccctagtactgattttattgtctacctctctggacttgctcccagcatccggaccaaaaccatcagtgccacagccacgacagaggccctgccccttctggaaaacctaaccatttccgacattaatccctacgggttcacagtttcctggatggcatcggagaatgcctttgacagctttctagtaacggtggtggattctgggaagctgctggacccccaggaattcacactttcaggaacccagaggaagctggagcttagaggcctcataactggcattggctatgaggttatggtctctggcttcacccaagggcatcaaaccaagcccttgagggctgagattgttacagaagccgaaccggaagttgacaaccttctggtttcagatgccaccccagacggtttccgtctgtcctggacagctgatgaaggggtcttcgacaattttgttctcaaaatcagagataccaaaaagcagtctgagccactggaaataaccctacttgcccccgaacgtaccagggacataacaggtctcagagaggctactgaatacgaaattgaactctatggaataagcaaaggaaggcgatcccagacagtcagtgctatagcaacaacagccatgggctccccaaaggaagtcattttctcagacatcactgaaaattcggctactgtcagctggagggcacccacagcccaagtggagagcttccggattacctatgtgcccattacaggaggtacaccctccatggtaactgtggacggaaccaagactcagaccaggctggtgaaactcatacctggcgtggagtaccttgtcagcatcatcgccatgaagggctttgaggaaagtgaacctgtctcagggtcattcaccacagctctggatggcccatctggcctggtgacagccaacatcactgactcagaagccttggccaggtggcagccagccattgccactgtggacagttatgtcatctcctacacaggcgagaaagtgccagaaattacacgcacggtgtccgggaacacagtggagtatgctctgaccgacctcgagcctgccacggaatacacactgagaatctttgcagagaaagggccccagaagagctcaaccatcactgccaagttcacaacagacctcgattctccaagagacttgactgctactgaggttcagtcggaaactgccctccttacctggcgacccccccgggcatcagtcaccggttacctgctggtctatgaatcagtggatggcacagtcaaggaagtcattgtgggtccagataccacctcctacagcctggcagacctgagcccatccacccactacacagccaagatccaggcactcaatgggcccctgaggagcaatatgatccagaccatcttcaccacaattggactcctgtaccccttccccaaggactgctcccaagcaatgctgaatggagacacgacctctggcctctacaccatttatctgaatggtgataaggctgaggcgctggaagtcttctgtgacatgacctctgatgggggtggatggattgtgttcctgagacgcaaaaacggacgcgagaacttctaccaaaactggaaggcatatgctgctggatttggggaccgcagagaagaattctggcttgggctggacaacctgaacaaaatcacagcccaggggcagtacgagctccgggtggacctgcgggaccatggggagacagcctttgctgtctatgacaagttcagcgtgggagatgccaagactcgctacaagctgaaggtggaggggtacagtgggacagcaggtgactccatggcctaccacaatggcagatccttctccacctttgacaaggacacagattcagccatcaccaactgtgctctgtcctacaaaggggctttctggtacaggaactgtcaccgtgtcaacctgatggggagatatggggacaataaccacagtcagggcgttaactggttccactggaagggccacgaacactcaatccagtttgctgagatgaagctgagaccaagcaacttcagaaatcttgaaggcaggcgcaaacgggcataaattccagggaccactgggtgagagaggaataaggcccagagcgaggaaaggattttaccaaagcatcaatacaaccagcccaaccatcggtccacacctgggcatttggtgagagtcaaagctgaccatggatccctggggccaacggcaacagcatgggcctcacctcctctgtgatttctttctttgcaccaaagacatcagtctccaacatgtttctgttttgttgtttgattcagcaaaaatctcccagtgacaacatcgcaatagttttttacttctcttaggtggctctgggaatgggagaggggtaggatgtacaggggtagtttgttttagaaccagccgtattttacatgaagctgtataattaattgtcattatttttgttagcaaagattaaatgtgtcattggaagccatccctttttttacatttcatacaacagaaaccagaaaagcaatactgtttccattttaaggatatgattaatattattaatataataatgatgatgatgatgatgaaaactaaggatttttcaagagatctttctttccaaaacatttctggacagtacctgattgtattttttttttaaataaaagcacaagtacttttgagtttgttaaaaaaaaaaaaaaaaaa

SEQ ID NO: 83 - DNA, 2389 bp, Homo sapiens
agatataaggcttggaagccagcagctgcgactcccgagacccccccaccagaaggccatggtctccccacggatgtccgggctcctctcccagactgtgatcctagcgctcattttcctcccccagacacggcccgctggcgtcttcgagctgcagatccactctttcgggccgggtccaggccctggggccccgcggtccccctgcagcgcccggctcccctgccgcctcttcttcagagtctgcctgaagcctgggctctcagaggaggccgccgagtccccgtgcgccctgggcgcggcgctgagtgcgcgcggaccggtctacaccgagcagcccggagcgcccgcgcctgatctcccactgcccgacggcctcttgcaggtgcccttccgggacgcctggcctggcaccttctctttcatcatcgaaacctggagagaggagttaggagaccagattggagggcccgcctggagcctgctggcgcgcgtggctggcaggcggcgcttggcagccggaggcccgtgggcccgggacattcagcgcgcaggcgcctgggagctgcgcttctcgtaccgcgcgcgctgcgagccgcctgccgtcgggaccgcgtgcacgcgcctctgccgtccgcgcagcgccccctcgcggtgcggtccgggactgcgcccctgcgcaccgctcgaggacgaatgtgaggcgccgctggtgtgccgagcaggctgcagccctgagcatggcttctgtgaacagcccggtgaatgccgatgcctagagggctggactggacccctctgcacggtccctgtctccaccagcagctgcctcagccccaggggcccgtcctctgctaccaccggatgccttgtccctgggcctgggccctgtgacgggaacccgtgtgccaatggaggcagctgtagtgagacacccaggtcctttgaatgcacctgcccgcgtgggttctacgggctgcggtgtgaggtgagcggggtgacatgtgcagatggaccctgcttcaacggcggcttgtgtgtcgggggtgcagaccctgactctgcctacatctgccactgcccacccggtttccaaggctccaactgtgagaagagggtggaccggtgcagcctgcagccatgccgcaatggcggactctgcctggacctgggccacgccctgcgctgccgctgccgcgccggcttcgcgggtcctcgctgcgagcacgacctggacgactgcgcgggccgcgcctgcgctaacggcggcacgtgtgtggagggcggcggcgcgcaccgctgctcctgcgcgctgggcttcggcggccgcgactgccgcgagcgcgcggacccgtgcgccgcgcgcccctgtgctcacggcggccgctgctacgcccacttctccggcctcgtctgcgcttgcgctcccggctacatgggagcgcggtgtgagttcccagtgcaccccgacggcgcaagcgccttgcccgcggccccgccgggcctcaggcccggggaccctcagcgctaccttttgcctccggctctgggactgctcgtggccgcgggcgtggccggcgctgcgctcttgctggtccacgtgcgccgccgtggccactcccaggatgctgggtctcgcttgctggctgggaccccggagccgtcagtccacgcactcccggatgcactcaacaacctaaggacgcaggagggttccggggatggtccgagctcgtccgtagattggaatcgccctgaagatgtagaccctcaagggatttatgtcatatctgctccttccatctacgctcgggaggtagcgacgccccttttccccccgctacacactgggcgcgctgggcagaggcagcacctgctttttccctacccttcctcgattctgtccgtgaaatgaattgggtagagtctctggaaggttttaagcccattttcagttctaacttactttcatcctattttgcatccctcttatcgttttgagctacctgccatcttctctttgaaaaacctatgggcttgaggaggtcacgatgccgactccgccagagcttttccactgattgtactcagcggggaggcaggggaggcagaggggcagcctctctaatgcttcctactcattttgtttctaggcctgacgcgtctcctccatccgcacctggagtcagagcgtggatttttgtatttgctcggtggtgcccagtctctgccccagaggctttggagttcaatcttgaaggggtgtctgggggaactttactgttgcaagttgtaaataatggttatttatatcctattttttctcaccccatctctctagaaacacctataaaggctattattgtgatcagttttgactaacaaaaaa

SEQ ID NO: 84 - DNA, 5988 bp, Homo sapiens
ctgcccggcgtgctgggtagaggtggccagccccggccgctgctgccagacgggctctccgggtccttctccgagagccgggcgggcacgcgtcattgtgttacctgcggccggcccgcgagctaggctggtttttttttttctcccctccctcccccctttttccatgcagctgatctaaaagggaataaaaggctgcgcataatcataataataaaagaaggggagcgcgagagaaggaaagaaagccgggaggtggaagaggagggggagcgtctcaaagaagcgatcagaataataaaaggaggccgggctctttgccttctggaacgggccgctcttgaaagggcttttgaaaagtggtgttgttttccagtcgtgcatgctccaatcggcggagtatattagagccgggacgcggcggccgcaggggcagcggcgacggcagcaccggcggcagcaccagcgcgaacagcagcggcggcgtcccgagtgcccgcggcgcgcggcgcagcgatgcgttccccacggacgcgcggccggtccgggcgccccctaagcctcctgctcgccctgctctgtgccctgcgagccaaggtgtgtggggcctcgggtcagttcgagttggagatcctgtccatgcagaacgtgaacggggagctgcagaacgggaactgctgcggcggcgcccggaacccgggagaccgcaagtgcacccgcgacgagtgtgacacatacttcaaagtgtgcctcaaggagtatcagtcccgcgtcacggccggggggccctgcagcttcggctcagggtccacgcctgtcatcgggggcaacaccttcaacctcaaggccagccgcggcaacgaccgcaaccgcatcgtgctgcctttcagtttcgcctggccgaggtcctatacgttgcttgtggaggcgtgggattccagtaatgacaccgttcaacctgacagtattattgaaaaggcttctcactcgggcatgatcaaccccagccggcagtggcagacgctgaagcagaacacgggcgttgcccactttgagtatcagatccgcgtgacctgtgatgactactactatggctttggctgcaataagttctgccgccccagagatgacttctttggacactatgcctgtgaccagaatggcaacaaaacttgcatggaaggctggatgggccccgaatgtaacagagctatttgccgacaaggctgcagtcctaagcatgggtcttgcaaactcccaggtgactgcaggtgccagtacggctggcaaggcctgtactgtgataagtgcatcccacacccgggatgcgtccacggcatctgtaatgagccctggcagtgcctctgtgagaccaactggggcggccagctctgtgacaaagatctcaattactgtgggactcatcagccgtgtctcaacgggggaacttgtagcaacacaggccctgacaaatatcagtgttcctgccctgaggggtattcaggacccaactgtgaaattgctgagcacgcctgcctctctgatccctgtcacaacagaggcagctgtaaggagacctccctgggctttgagtgtgagtgttccccaggctggaccggccccacatgctctacaaacattgatgactgttctcctaataactgttcccacgggggcacctgccaggacctggttaacggatttaagtgtgtgtgccccccacagtggactgggaaaacgtgccagttagatgcaaatgaatgtgaggccaaaccttgtgtaaacgccaaatcctgtaagaatctcattgccagctactactgcgactgtcttcccggctggatgggtcagaattgtgacataaatattaatgactgccttggccagtgtcagaatgacgcctcctgtcgggatttggttaatggttatcgctgtatctgtccacctggctatgcaggcgatcactgtgagagagacatcgatgaatgtgccagcaacccctgtttgaatgggggtcactgtcagaatgaaatcaacagattccagtgtctgtgtcccactggtttctctggaaacctctgtcagctggacatcgattattgtgagcctaatccctgccagaacggtgcccagtgctacaaccgtgccagtgactatttctgcaagtgccccgaggactatgagggcaagaactgctcacacctgaaagaccactgccgcacgaccccctgtgaagtgattgacagctgcacagtggccatggcttccaacgacacacctgaaggggtgcggtatatttcctccaacgtctgtggtcctcacgggaagtgcaagagtcagtcgggaggcaaattcacctgtgactgtaacaaaggcttcacgggaacatactgccatgaaaatattaatgactgtgagagcaacccttgtagaaacggtggcacttgcatcgatggtgtcaactcctacaagtgcatctgtagtgacggctgggagggggcctactgtgaaaccaatattaatgactgcagccagaacccctgccacaatgggggcacgtgtcgcgacctggtcaatgacttctactgtgactgtaaaaatgggtggaaaggaaagacctgccactcacgtgacagtcagtgtgatgaggccacgtgcaacaacggtggcacctgctatgatgagggggatgcttttaagtgcatgtgtcctggcggctgggaaggaacaacctgtaacatagcccgaaacagtagctgcctgcccaacccctgccataatgggggcacatgtgtggtcaacggcgagtcctttacgtgcgtctgcaaggaaggctgggaggggcccatctgtgctcagaataccaatgactgcagccctcatccctgttacaacagcggcacctgtgtggatggagacaactggtaccggtgcgaatgtgccccgggttttgctgggcccgactgcagaataaacatcaatgaatgccagtcttcaccttgtgcctttggagcgacctgtgtggatgagatcaatggctaccggtgtgtctgccctccagggcacagtggtgccaagtgccaggaagtttcagggagaccttgcatcaccatggggagtgtgataccagatggggccaaatgggatgatgactgtaatacctgccagtgcctgaatggacggatcgcctgctcaaaggtctggtgtggccctcgaccttgcctgctccacaaagggcacagcgagtgccccagcgggcagagctgcatccccatcctggacgaccagtgcttcgtccacccctgcactggtgtgggcgagtgtcggtcttccagtctccagccggtgaagacaaagtgcacctctgactcctattaccaggataactgtgcgaacatcacatttacctttaacaaggagatgatgtcaccaggtcttactacggagcacatttgcagtgaattgaggaatttgaatattttgaagaatgtttccgctgaatattcaatctacatcgcttgcgagccttccccttcagcgaacaatgaaatacatgtggccatttctgctgaagatatacgggatgatgggaacccgatcaaggaaatcactgacaaaataatcgatcttgttagtaaacgtgatggaaacagctcgctgattgctgccgttgcagaagtaagagttcagaggcggcctctgaagaacagaacagatttccttgttcccttgctgagctctgtcttaactgtggcttggatctgttgcttggtgacggccttctactggtgcctgcggaagcggcggaagccgggcagccacacacactcagcctctgaggacaacaccaccaacaacgtgcgggagcagctgaaccagatcaaaaaccccattgagaaacatggggccaacacggtccccatcaaggattatgagaacaagaactccaaaatgtctaaaataaggacacacaattctgaagtagaagaggacgacatggacaaacaccagcagaaagcccggtttgccaagcagccggcgtacacgctggtagacagagaagagaagccccccaacggcacgccgacaaaacacccaaactggacaaacaaacaggacaacagagacttggaaagtgcccagagcttaaaccgaatggagtacatcgtatagcagaccgcgggcactgccgccgctaggtagagtctgagggcttgtagttctttaaactgtcgtgtcatactcgagtctgaggccgttgctgacttagaatccctgtgttaatttaagttttgacaagctggcttacactggcaatggtagtttctgtggttggctgggaaatcgagtgccgcatctcacagctatgcaaaaagctagtcaacagtaccctggttgtgtgtccccttgcagccgacacggtctcggatcaggctcccaggagcctgcccagccccctggtctttgagctcccacttctgccagatgtcctaatggtgatgcagtcttagatcatagttttatttatatttattgactcttgagttgtttttgtatattggttttatgatgacgtacaagtagttctgtatttgaaagtgcctttgcagctcagaaccacagcaacgatcacaaatgactttattatttattttttttaattgtatttttgttgttgggggaggggagactttgatgtcagcagttgctggtaaaatgaagaatttaaagaaaaaaatgtcaaaagtagaactttgtatagttatgtaaataattcttttttattaatcactgtgtatatttgatttattaacttaataatcaagagccttaaaacatcattcctttttatttatatgtatgtgtttagaattgaaggtttttgatagcattgtaagcgtatggctttatttttttgaactcttctcattacttgttgcctataagccaaaattaaggtgtttgaaaatagtttattttaaaacaataggatgggcttctgtgcccagaatactgatggaatttttttgtacgacgtcagatgtttaaaacaccttctatagcatcacttaaaacacgttttaaggactgactgaggcagtttgaggattagtttagaacaggtttttttgtttgtttgttttttgtttttctgctttagacttgaaaagagacaggcaggtgatctgctgcagagcagtaagggaacaagttgagctatgacttaacatagccaaaatgtgagtggttgaatatgattaaaaatatcaaattaattgtgtgaacttggaagcacaccaatcttactttgtaaattctgatttcttttcaccattcgtacataatactgaaccacttgtagatttgatttttttttttaatctactgcatttagggagtattctaataagctagttgaatacttgaaccataaaatgtccagtaagatcactgtttagatttgccatagagtacactgcctgccttaagtgaggaaatcaaagtgctattacgaagttcaagatcaaaaaggcttataaaacagagtaatcttgttggttcaccattgagaccgtgaagatactttgtattgtcctattagtgttatatgaacatacaaatgcatctttgatgtgttgttcttggcaataaattttgaaaagtaatatttattaaatttttttgtatgaaaacatggaacagtgtggcctcttctgagcttacgtagttctaccggctttgccatgtgcttctgccaccctgctgagtctgttctggtaatcggggtataataggctctgcctgacagagggatggaggaagaactgaaaggcttttcaaccacaaaactcatctggagttctcaaagacctggggctgctgtgaagctggaactgcgggagccccatctaggggagccttgattcccttgttattcaacagcaagtgtgaatactgcttgaataaacaccactggattaatggcca

SEQ ID NO: 85 - DNA, 12507 bp, Homo sapiens
taccgggcggaggtgagcgcggcgccggctcctcctgcggcggactttgggtgcgacttgacgagcggtggttcgacaagtggccttgcgggccggatcgtcccagtggaagagttgtaaatttgcttctggccttcccctacggattatacctggccttcccctacggattatactcaacttactgtttagaaaatgtggcccacgagacgcctggttactatcaaaaggagcggggtcgacggtccccactttcccctgagcctcagcacctgcttgtttggaaggggtattgaatgtgacatccgtatccagcttcctgttgtgtcaaaacaacattgcaaaattgaaatccatgagcaggaggcaatattacataatttcagttccacaaatccaacacaagtaaatgggtctgttattgatgagcctgtacggctaaaacatggagatgtaataactattattgatcgttccttcaggtatgaaaatgaaagtcttcagaatggaaggaagtcaactgaatttccaagaaaaatacgtgaacaggagccagcacgtcgtgtctcaagatctagcttctcttctgaccctgatgagaaagctcaagattccaaggcctattcaaaaatcactgaaggaaaagtttcaggaaatcctcaggtacatatcaagaatgtcaaagaagacagtaccgcagatgactcaaaagacagtgttgctcagggaacaactaatgttcattcctcagaacatgctggacgtaatggcagaaatgcagctgatcccatttctggggattttaaagaaatttccagcgttaaattagtgagccgttatggagaattgaagtctgttcccactacacaatgtcttgacaatagcaaaaaaaatgaatctcccttttggaagctttatgagtcagtgaagaaagagttggatgtaaaatcacaaaaagaaaatgtcctacagtattgtagaaaatctggattacaaactgattacgcaacagagaaagaaagtgctgatggtttacagggggagacccaactgttggtctcgcgtaagtcaagaccaaaatctggtgggagcggccacgctgtggcagagcctgcttcacctgaacaagagcttgaccagaacaaggggaagggaagagacgtggagtctgttcagactcccagcaaggctgtgggcgccagctttcctctctatgagccggctaaaatgaagacccctgtacaatattcacagcaacaaaattctccacaaaaacataagaacaaagacctgtatactactggtagaagagaatctgtgaatctgggtaaaagtgaaggcttcaaggctggtgataaaactcttactcccaggaagctttcaactagaaatcgaacaccagctaaagttgaagatgcagctgactctgccactaagccagaaaatctctcttccaaaaccagaggaagtattcctacagatgtggaagttctgcctacggaaactgaaattcacaatgagccatttttaactctgtggctcactcaagttgagaggaagatccaaaaggattccctcagcaagcctgagaaattgggcactacagctggacagatgtgctctgggttacctggtcttagttcagttgatatcaacaactttggtgattccattaatgagagtgagggaatacctttgaaaagaaggcgtgtgtcctttggtgggcacctaagacctgaactatttgatgaaaacttgcctcctaatacgcctctcaaaaggggagaagccccaaccaaaagaaagtctctggtaatgcacactccacctgtcctgaagaaaatcatcaaggaacagcctcaaccatcaggaaaacaagagtcaggttcagaaatccatgtggaagtgaaggcacaaagcttggttataagccctccagctcctagtcctaggaaaactccagttgccagtgatcaacgccgtaggtcctgcaaaacagcccctgcttccagcagcaaatctcagacagaggttcctaagagaggagggagaaagagtggcaacctgccttcaaagagagtgtctatcagccgaagtcaacatgatattttacagatgatatgttccaaaagaagaagtggtgcttcggaagcaaatctgattgttgcaaaatcatgggcagatgtagtaaaacttggtgcaaaacaaacacaaactaaagtcataaaacatggtcctcaaaggtcaatgaacaaaaggcaaagaagacctgctactccaaagaagcctgtgggcgaagttcacagtcaatttagtacaggccacgcaaactctccttgtaccataataatagggaaagctcatactgaaaaagtacatgtgcctgctcgaccctacagagtgctcaacaacttcatttccaaccaaaaaatggactttaaggaagatctttcaggaatagctgaaatgttcaagaccccagtgaaggagcaaccgcagttgacaagcacatgtcacatcgctatttcaaattcagagaatttgcttggaaaacagtttcaaggaactgattcaggagaagaacctctgctccccacctcagagagttttggaggaaatgtgttcttcagtgcacagaatgcagcaaaacagccatctgataaatgctctgcaagccctcccttaagacggcagtgtattagagaaaatggaaacgtagcaaaaacgcccaggaacacctacaaaatgacttctctggagacaaaaacttcagatactgagacagagccttcaaaaacagtatccactgcaaacaggtcaggaaggtctacagagttcaggaatatacagaagctacctgtggaaagtaagagtgaagaaacaaatacagaaattgttgagtgcatcctaaaaagaggtcagaaggcaacactactacaacaaaggagagaaggagagatgaaggaaatagaaagaccttttgagacatataaggaaaatattgaattaaaagaaaacgatgaaaagatgaaagcaatgaagagatcaagaacttgggggcagaaatgtgcaccaatgtctgacctgacagacctcaagagcttgcctgatacagaactcatgaaagacacggcacgtggccagaatctcctccaaacccaagatcatgccaaggcaccaaagagtgagaaaggcaaaatcactaaaatgccctgccagtcattacaaccagaaccaataaacaccccaacacacacaaaacaacagttgaaggcatccctggggaaagtaggtgtgaaagaagagctcctagcagtcggcaagttcacacggacgtcaggggagaccacgcacacgcacagagagccagcaggagatggcaagagcatcagaacgtttaaggagtctccaaagcagatcctggacccagcagcccgtgtaactggaatgaagaagtggccaagaacgcctaaggaagaggcccagtcactagaagacctggctggcttcaaagagctcttccagacaccaggtccctctgaggaatcaatgactgatgagaaaactaccaaaatagcctgcaaatctccaccaccagaatcagtggacactccaacaagcacaaagcaatggcctaagagaagtctcaggaaagcagatgtagaggaagaattcttagcactcaggaaactaacaccatcagcagggaaagccatgcttacgcccaaaccagcaggaggtgatgagaaagacattaaagcatttatgggaactccagtgcagaaactggacctggcaggaactttacctggcagcaaaagacagctacagactcctaaggaaaaggcccaggctctagaagacctggctggctttaaagagctcttccagactcctggtcacaccgaggaattagtggctgctggtaaaaccactaaaataccctgcgactctccacagtcagacccagtggacaccccaacaagcacaaagcaacgacccaagagaagtatcaggaaagcagatgtagagggagaactcttagcgtgcaggaatctaatgccatcagcaggcaaagccatgcacacgcctaaaccatcagtaggtgaagagaaagacatcatcatatttgtgggaactccagtgcagaaactggacctgacagagaacttaaccggcagcaagagacggccacaaactcctaaggaagaggcccaggctctggaagacctgactggctttaaagagctcttccagacccctggtcatactgaagaagcagtggctgctggcaaaactactaaaatgccctgcgaatcttctccaccagaatcagcagacaccccaacaagcacaagaaggcagcccaagacacctttggagaaaagggacgtacagaaggagctctcagccctgaagaagctcacacagacatcaggggaaaccacacacacagataaagtaccaggaggtgaggataaaagcatcaacgcgtttagggaaactgcaaaacagaaactggacccagcagcaagtgtaactggtagcaagaggcacccaaaaactaaggaaaaggcccaacccctagaagacctggctggcttgaaagagctcttccagacaccagtatgcactgacaagcccacgactcacgagaaaactaccaaaatagcctgcagatcacaaccagacccagtggacacaccaacaagctccaagccacagtccaagagaagtctcaggaaagtggacgtagaagaagaattcttcgcactcaggaaacgaacaccatcagcaggcaaagccatgcacacacccaaaccagcagtaagtggtgagaaaaacatctacgcatttatgggaactccagtgcagaaactggacctgacagagaacttaactggcagcaagagacggctacaaactcctaaggaaaaggcccaggctctagaagacctggctggctttaaagagctcttccagacacgaggtcacactgaggaatcaatgactaacgataaaactgccaaagtagcctgcaaatcttcacaaccagacccagacaaaaacccagcaagctccaagcgacggctcaagacatccctggggaaagtgggcgtgaaagaagagctcctagcagttggcaagctcacacagacatcaggagagactacacacacacacacagagccaacaggagatggtaagagcatgaaagcatttatggagtctccaaagcagatcttagactcagcagcaagtctaactggcagcaagaggcagctgagaactcctaagggaaagtctgaagtccctgaagacctggccggcttcatcgagctcttccagacaccaagtcacactaaggaatcaatgactaacgaaaaaactaccaaagtatcctacagagcttcacagccagacctagtggacaccccaacaagctccaagccacagcccaagagaagtctcaggaaagcagacactgaagaagaatttttagcatttaggaaacaaacgccatcagcaggcaaagccatgcacacacccaaaccagcagtaggtgaagagaaagacatcaacacgtttttgggaactccagtgcagaaactggaccagccaggaaatttacctggcagcaatagacggctacaaactcgtaaggaaaaggcccaggctctagaagaactgactggcttcagagagcttttccagacaccatgcactgataaccccacgactgatgagaaaactaccaaaaaaatactctgcaaatctccgcaatcagacccagcggacaccccaacaaacacaaagcaacggcccaagagaagcctcaagaaagcagacgtagaggaagaatttttagcattcaggaaactaacaccatcagcaggcaaagccatgcacacgcctaaagcagcagtaggtgaagagaaagacatcaacacatttgtggggactccagtggagaaactggacctgctaggaaatttacctggcagcaagagacggccacaaactcctaaagaaaaggccaaggctctagaagatctggctggcttcaaagagctcttccagacaccaggtcacactgaggaatcaatgaccgatgacaaaatcacagaagtatcctgcaaatctccacaaccagacccagtcaaaaccccaacaagctccaagcaacgactcaagatatccttggggaaagtaggtgtgaaagaagaggtcctaccagtcggcaagctcacacagacgtcagggaagaccacacagacacacagagagacagcaggagatggaaagagcatcaaagcgtttaaggaatctgcaaagcagatgctggacccagcaaactatggaactgggatggagaggtggccaagaacacctaaggaagaggcccaatcactagaagacctggccggcttcaaagagctcttccagacaccagaccacactgaggaatcaacaactgatgacaaaactaccaaaatagcctgcaaatctccaccaccagaatcaatggacactccaacaagcacaaggaggcggcccaaaacacctttggggaaaagggatatagtggaagagctctcagccctgaagcagctcacacagaccacacacacagacaaagtaccaggagatgaggataaaggcatcaacgtgttcagggaaactgcaaaacagaaactggacccagcagcaagtgtaactggtagcaagaggcagccaagaactcctaagggaaaagcccaacccctagaagacttggctggcttgaaagagctcttccagacaccaatatgcactgacaagcccacgactcatgagaaaactaccaaaatagcctgcagatctccacaaccagacccagtgggtaccccaacaatcttcaagccacagtccaagagaagtctcaggaaagcagacgtagaggaagaatccttagcactcaggaaacgaacaccatcagtagggaaagctatggacacacccaaaccagcaggaggtgatgagaaagacatgaaagcatttatgggaactccagtgcagaaattggacctgccaggaaatttacctggcagcaaaagatggccacaaactcctaaggaaaaggcccaggctctagaagacctggctggcttcaaagagctcttccagacaccaggcactgacaagcccacgactgatgagaaaactaccaaaatagcctgcaaatctccacaaccagacccagtggacaccccagcaagcacaaagcaacggcccaagagaaacctcaggaaagcagacgtagaggaagaatttttagcactcaggaaacgaacaccatcagcaggcaaagccatggacacaccaaaaccagcagtaagtgatgagaaaaatatcaacacatttgtggaaactccagtgcagaaactggacctgctaggaaatttacctggcagcaagagacagccacagactcctaaggaaaaggctgaggctctagaggacctggttggcttcaaagaactcttccagacaccaggtcacactgaggaatcaatgactgatgacaaaatcacagaagtatcctgtaaatctccacagccagagtcattcaaaacctcaagaagctccaagcaaaggctcaagatacccctggtgaaagtggacatgaaagaagagcccctagcagtcagcaagctcacacggacatcaggggagactacgcaaacacacacagagccaacaggagatagtaagagcatcaaagcgtttaaggagtctccaaagcagatcctggacccagcagcaagtgtaactggtagcaggaggcagctgagaactcgtaaggaaaaggcccgtgctctagaagacctggttgacttcaaagagctcttctcagcaccaggtcacactgaagagtcaatgactattgacaaaaacacaaaaattccctgcaaatctcccccaccagaactaacagacactgccacgagcacaaagagatgccccaagacacgtcccaggaaagaagtaaaagaggagctctcagcagttgagaggctcacgcaaacatcagggcaaagcacacacacacacaaagaaccagcaagcggtgatgagggcatcaaagtattgaagcaacgtgcaaagaagaaaccaaacccagtagaagaggaacccagcaggagaaggccaagagcacctaaggaaaaggcccaacccctggaagacctggccggcttcacagagctctctgaaacatcaggtcacactcaggaatcactgactgctggcaaagccactaaaataccctgcgaatctcccccactagaagtggtagacaccacagcaagcacaaagaggcatctcaggacacgtgtgcagaaggtacaagtaaaagaagagccttcagcagtcaagttcacacaaacatcaggggaaaccacggatgcagacaaagaaccagcaggtgaagataaaggcatcaaagcattgaaggaatctgcaaaacagacaccggctccagcagcaagtgtaactggcagcaggagacggccaagagcacccagggaaagtgcccaagccatagaagacctagctggcttcaaagacccagcagcaggtcacactgaagaatcaatgactgatgacaaaaccactaaaataccctgcaaatcatcaccagaactagaagacaccgcaacaagctcaaagagacggcccaggacacgtgcccagaaagtagaagtgaaggaggagctgttagcagttggcaagctcacacaaacctcaggggagaccacgcacaccgacaaagagccggtaggtgagggcaaaggcacgaaagcatttaagcaacctgcaaagcggaagctggacgcagaagatgtaattggcagcaggagacagccaagagcacctaaggaaaaggcccaacccctggaagatctggccagcttccaagagctctctcaaacaccaggccacactgaggaactggcaaatggtgctgctgatagctttacaagcgctccaaagcaaacacctgacagtggaaaacctctaaaaatatccagaagagttcttcgggcccctaaagtagaacccgtgggagacgtggtaagcaccagagaccctgtaaaatcacaaagcaaaagcaacacttccctgcccccactgcccttcaagaggggaggtggcaaagatggaagcgtcacgggaaccaagaggctgcgctgcatgccagcaccagaggaaattgtggaggagctgccagccagcaagaagcagagggttgctcccagggcaagaggcaaatcatccgaacccgtggtcatcatgaagagaagtttgaggacttctgcaaaaagaattgaacctgcggaagagctgaacagcaacgacatgaaaaccaacaaagaggaacacaaattacaagactcggtccctgaaaataagggaatatccctgcgctccagacgccaaaataagactgaggcagaacagcaaataactgaggtctttgtattagcagaaagaatagaaataaacagaaatgaaaagaagcccatgaagacctccccagagatggacattcagaatccagatgatggagcccggaaacccatacctagagacaaagtcactgagaacaaaaggtgcttgaggtctgctagacagaatgagagctcccagcctaaggtggcagaggagagcggagggcagaagagtgcgaaggttctcatgcagaatcagaaagggaaaggagaagcaggaaattcagactccatgtgcctgagatcaagaaagacaaaaagccagcctgcagcaagcactttggagagcaaatctgtgcagagagtaacgcggagtgtcaagaggtgtgcagaaaatccaaagaaggctgaggacaatgtgtgtgtcaagaaaataagaaccagaagtcatagggacagtgaagatatttgacagaaaaatcgaactgggaaaaatataataaagttagttttgtgataagttctagtgcagtttttgtcataaattacaagtgaattctgtaagtaaggctgtcagtctgcttaagggaagaaaactttggatttgctgggtctgaatcggcttcataaactccactgggagcactgctgggctcctggactgagaatagttgaacaccgggggctttgtgaaggagtctgggccaaggtttgccctcagctttgcagaatgaagccttgaggtctgtcaccacccacagccaccctacagcagccttaactgtgacacttgccacactgtgtcgtcgtttgtttgcctatgtcctccagggcacggtggcaggaacaactatcctcgtctgtcccaacactgagcaggcactcggtaaacacgaatgaatggatgagcgcacggatgaatggagcttacaagatctgtctttccaatggccgggggcatttggtccccaaattaaggctattggacatctgcacaggacagtcctatttttgatgtcctttcctttctgaaaataaagttttgtgctttggagaatgactcgtgagcacatctttagggaccaagagtgactttctgtaaggagtgactcgtggcttgccttggtctcttgggaatacttttctaactagggttgctctcacctgagacattctccacccgcggaatctcagggtcccaggctgtgggccatcacgacctcaaactggctcctaatctccagctttcctgtcattgaaagcttcggaagtttactggctctgctcccgcctgttttctttctgactctatctggcagcccgatgccacccagtacaggaagtgacaccagtactctgtaaagcatcatcatccttggagagactgagcactcagcaccttcagccacgatttcaggatcgcttccttgtgagccgctgcctccgaaatctcctttgaagcccagacatctttctccagcttcagacttgtagatataactcgttcatcttcatttactttccactttgccccctgtcctctctgtgttccccaaatcagagaatagcccgccatcccccaggtcacctgtctggattcctccccattcacccaccttgccaggtgcaggtgaggatggtgcaccagacagggtagctgtcccccaaaatgtgccctgtgcgggcagtgccctgtctccacgtttgtttccccagtgtctggcggggagccaggtgacatcataaatacttgctgaatgaatgcagaaatcagcggtactgacttgtactatattggctgccatgatagggttctcacagcgtcatccatgatcgtaagggagaatgacattctgcttgagggagggaatagaaaggggcagggaggggacatctgagggcttcacagggctgcaaagggtacagggattgcaccagggcagaacaggggagggtgttcaaggaagagtggctcttagcagaggcactttggaaggtgtgaggcataaatgcttccttctacgtaggccaacctcaaaactttcagtaggaatgttgctatgatcaagttgttctaacactttagacttagtagtaattatgaacctcacatagaaaaatttcatccagccatatgcctgtggagtggaatattctgtttagtagaaaaatcctttagagttcagctctaaccagaaatcttgctgaagtatgtcagcaccttttctcaccctggtaagtacagtatttcaagagcacgctaagggtggttttcattttacagggctgttgatgatgggttaaaaatgttcatttaagggctacccccgtgtttaatagatgaacaccacttctacacaaccctccttggtactgggggagggagagatctgacaaatactgcccattcccctaggctgactggatttgagaacaaatacccacccatttccaccatggtatggtaacttctctgagcttcagtttccaagtgaatttccatgtaataggacattcccattaaatacaagctgtttttactttttcgcctcccagggcctgtgggatctggtcccccagcctctcttgggctttcttacactaactctgtacctaccatctcctgcctcccttaggcaggcacctccaaccaccacacactccctgctgttttccctgcctggaactttccctcctgccccaccaagatcatttcatccagtcctgagctcagcttaagggaggcttcttgcctgtgggttccctcacccccatgcctgtcctccaggctggggcaggttcttagtttgcctggaattgttctgtacctctttgtagcacgtagtgttgtggaaactaagccactaattgagtttctggctcccctcctggggttgtaagttttgttcattcatgagggccgactgcatttcctggttactctatcccagtgaccagccacaggagatgtccaataaagtatgtgatgaaatggtcttaaaaaaaaaaaaaa

SEQ ID NO: 86 - DNA, 2723 bp, Homo sapiens
ggcggcgcttgattgggctgggggggccaaataaaagcgatggcgattgggctgccgcgtttggcgctcggtccggtcgcgtccgacacccggtgggactcagaaggcagtggagccccggcggcggcggcggcggcgcgcgggggcgacgcgcgggaacaacgcgagtcggcgcgcgggacgaagaataatcatgggccagactgggaagaaatctgagaagggaccagtttgttggcggaagcgtgtaaaatcagagtacatgcgactgagacagctcaagaggttcagacgagctgatgaagtaaagagtatgtttagttccaatcgtcagaaaattttggaaagaacggaaatcttaaaccaagaatggaaacagcgaaggatacagcctgtgcacatcctgacttctgtgagctcattgcgcgggactagggagtgttcggtgaccagtgacttggattttccaacacaagtcatcccattaaagactctgaatgcagttgcttcagtacccataatgtattcttggtctcccctacagcagaattttatggtggaagatgaaactgttttacataacattccttatatgggagatgaagttttagatcaggatggtactttcattgaagaactaataaaaaattatgatgggaaagtacacggggatagagaatgtgggtttataaatgatgaaatttttgtggagttggtgaatgcccttggtcaatataatgatgatgacgatgatgatgatggagacgatcctgaagaaagagaagaaaagcagaaagatctggaggatcaccgagatgataaagaaagccgcccacctcggaaatttccttctgataaaatttttgaagccatttcctcaatgtttccagataagggcacagcagaagaactaaaggaaaaatataaagaactcaccgaacagcagctcccaggcgcacttcctcctgaatgtacccccaacatagatggaccaaatgctaaatctgttcagagagagcaaagcttacactcctttcatacgcttttctgtaggcgatgttttaaatatgactgcttcctacatcgtaagtgcaattattcttttcatgcaacacccaacacttataagcggaagaacacagaaacagctctagacaacaaaccttgtggaccacagtgttaccagcatttggagggagcaaaggagtttgctgctgctctcaccgctgagcggataaagaccccaccaaaacgtccaggaggccgcagaagaggacggcttcccaataacagtagcaggcccagcacccccaccattaatgtgctggaatcaaaggatacagacagtgatagggaagcagggactgaaacggggggagagaacaatgataaagaagaagaagagaagaaagatgaaacttcgagctcctctgaagcaaattctcggtgtcaaacaccaataaagatgaagccaaatattgaacctcctgagaatgtggagtggagtggtgctgaagcctcaatgtttagagtcctcattggcacttactatgacaatttctgtgccattgctaggttaattgggaccaaaacatgtagacaggtgtatgagtttagagtcaaagaatctagcatcatagctccagctcccgctgaggatgtggatactcctccaaggaaaaagaagaggaaacaccggttgtgggctgcacactgcagaaagatacagctgaaaaaggacggctcctctaaccatgtttacaactatcaaccctgtgatcatccacggcagccttgtgacagttcgtgcccttgtgtgatagcacaaaatttttgtgaaaagttttgtcaatgtagttcagagtgtcaaaaccgctttccgggatgccgctgcaaagcacagtgcaacaccaagcagtgcccgtgctacctggctgtccgagagtgtgaccctgacctctgtcttacttgtggagccgctgaccattgggacagtaaaaatgtgtcctgcaagaactgcagtattcagcggggctccaaaaagcatctattgctggcaccatctgacgtggcaggctgggggatttttatcaaagatcctgtgcagaaaaatgaattcatctcagaatactgtggagagattatttctcaagatgaagctgacagaagagggaaagtgtatgataaatacatgtgcagctttctgttcaacttgaacaatgattttgtggtggatgcaacccgcaagggtaacaaaattcgttttgcaaatcattcggtaaatccaaactgctatgcaaaagttatgatggttaacggtgatcacaggataggtatttttgccaagagagccatccagactggcgaagagctgttttttgattacagatacagccaggctgatgccctgaagtatgtcggcatcgaaagagaaatggaaatcccttgacatctgctacctcctcccccctcctctgaaacagctgccttagcttcaggaacctcgagtactgtgggcaatttagaaaaagaacatgcagtttgaaattctgaatttgcaaagtactgtaagaataatttatagtaatgagtttaaaaatcaactttttattgccttctcaccagctgcaaagtgttttgtaccagtgaatttttgcaataatgcagtatggtacatttttcaactttgaataaagaatacttgaacttgtccttgttgaatc

SEQ ID NO: 87 - DNA, 3509 bp, Homo sapiens
ggcgccctgaaacgttcggcgagccgactgcggctgcgcggggtattcgaatcggcggcggcttctagtttgcggttcaggtttggccgctgccggccagcgtcctctggccatggacaccccggaaaatgtccttcagatgcttgaagcccacatgcagagctacaagggcaatgaccctcttggtgaatgggaaagatacatacagtgggtagaagagaattttcctgagaataaagaatacttgataactttactagaacatttaatgaaggaatttttagataagaagaaataccacaatgacccaagattcatcagttattgtttaaaatttgctgagtacaacagtgacctccatcaattttttgagtttctgtacaaccatgggattggaaccctgtcatcccctctgtacattgcctgggcggggcatctggaagcccaaggagagctgcagcatgccagtgctgtccttcagagaggaattcaaaaccaggctgaacccagagagttcctgcaacaacaatacaggttatttcagacacgcctcactgaaacccatttgccagctcaagctagaacctcagaacctctgcataatgttcaggttttaaatcaaatgataacatcaaaatcaaatccaggaaataacatggcctgcatttctaagaatcagggttcagagctttctggagtgatatcttcagcttgtgataaagagtcaaatatggaacgaagagtgatcacgatttctaaatcagaatattctgtgcactcatctttggcatccaaagttgatgttgagcaggttgttatgtattgcaaggagaagcttattcgtggggaatcagaattttcctttgaagaattgagagcccagaaatacaatcaacggagaaagcatgagcaatgggtaaatgaagacagacattatatgaaaaggaaagaagcaaatgcttttgaagaacagctattaaaacagaaaatggatgaacttcataagaagttgcatcaggtggtggagacatcccatgaggatctgcccgcttcccaggaaaggtccgaggttaatccagcacgtatggggccaagtgtaggctcccagcaggaactgagagcgccatgtcttccagtaacctatcagcagacaccagtgaacatggaaaagaacccaagagaggcacctcctgttgttcctcctttggcaaatgctatttctgcagctttggtgtccccagccaccagccagagcattgctcctcctgttcctttgaaagcccagacagtaacagactccatgtttgcagtggccagcaaagatgctggatgtgtgaataagagtactcatgaattcaagccacagagtggagcagagatcaaagaagggtgtgaaacacataaggttgccaacacaagttcttttcacacaactccaaacacatcactgggaatggttcaggcaacgccatccaaagtgcagccatcacccaccgtgcacacaaaagaagcattaggtttcatcatgaatatgtttcaggctcctacacttcctgatatttctgatgacaaagatgaatggcaatctctagatcaaaatgaagatgcatttgaagcccagtttcaaaaaaatgtaaggtcatctggggcttggggagtcaataagatcatctcttctttgtcatctgcttttcatgtgtttgaagatggaaacaaagaaaattatggattaccacagcctaaaaataaacccacaggagccaggacctttggagaacgctctgtcagcagacttccttcaaaaccaaaggaggaagtgcctcatgctgaagagtttttggatgactcaactgtatggggtattcgctgcaacaaaaccctggcacccagtcctaagagcccaggagacttcacatctgctgcacaacttgcgtctacaccattccacaagcttccagtggagtcagtgcacattttagaagataaagaaaatgtggtagcaaaacagtgtacccaggcgactttggattcttgtgaggaaaacatggtggtgccttcaagggatggaaaattcagtccaattcaagagaaaagcccaaaacaggccttgtcgtctcacatgtattcagcatccttacttcgtctgagccagcctgctgcaggtggggtacttacctgtgaggcagagttgggcgttgaggcttgcagactcacagacactgacgctgccattgcagaagatccaccagatgctattgctgggctccaagcagaatggatgcagatgagttcacttgggactgttgatgctccaaacttcattgttgggaacccatgggatgataagctgattttcaaacttttatctgggctttctaaaccagtgagttcctatccaaatacttttgaatggcaatgtaaacttccagccatcaagcccaagactgaatttcaattgggttctaagctggtctatgtccatcaccttcttggagaaggagcctttgcccaggtgtacgaagctacccagggagatctgaatgatgctaaaaataaacagaaatttgttttaaaggtccaaaagcctgccaacccctgggaattctacattgggacccagttgatggaaagactaaagccatctatgcagcacatgtttatgaagttctattctgcccacttattccagaatggcagtgtattagtaggagagctctacagctatggaacattattaaatgccattaacctctataaaaatacccctgaaaaagtgatgcctcaaggtcttgtcatctcttttgctatgagaatgctttacatgattgagcaagtgcatgactgtgaaatcattcatggagacattaaaccagacaatttcatacttggaaacggatttttggaacaggatgatgaagatgatttatctgctggcttggcactgattgacctgggtcagagtatagatatgaaactttttccaaaaggaactatattcacagcaaagtgtgaaacatctggttttcagtgtgttgagatgctcagcaacaaaccatggaactaccagatcgattactttggggttgctgcaacagtatattgcatgctctttggcacttacatgaaagtgaaaaatgaaggaggagagtgtaagcctgaaggtctttttagaaggcttcctcatttggatatgtggaatgaattttttcatgttatgttgaatattccagattgtcatcatcttccatctttggatttgttaaggcaaaagctgaagaaagtatttcaacaacactatactaacaagattagggccctacgtaataggctaattgtactgctcttagaatgtaagcgttcacgaaaataaaatttggatatagacagtccttaaaaatcacactgtaaatatgaatctgctcactttaaacctgtttttttttcatttattgtttatgtaaatgtttgttaaaaataaatcccatggaatatttccatgtaaaaaaaaa

SEQ ID NO: 88 - DNA, 2346 bp, Homo sapiens
acaaggcagcctcgctcgagcgcaggccaatcggctttctagctagagggtttaactcctatttaaaaagaagaacctttgaattctaacggctgagctcttggaagacttgggtccttgggtcgcaggtgggagccgacgggtgggtagaccgtgggggatatctcagtggcggacgaggacggcggggacaaggggcggctggtcggagtggcggagcgtcaagtcccctgtcggttcctccgtccctgagtgtccttggcgctgccttgtgcccgcccagcgcctttgcatccgctcctgggcaccgaggcgccctgtaggatactgcttgttacttattacagctagaggcatcatggaccgatctaaagaaaactgcatttcaggacctgttaaggctacagctccagttggaggtccaaaacgtgttctcgtgactcagcaatttccttgtcagaatccattacctgtaaatagtggccaggctcagcgggtcttgtgtccttcaaattcttcccagcgcattcctttgcaagcacaaaagcttgtctccagtcacaagccggttcagaatcagaagcagaagcaattgcaggcaaccagtgtacctcatcctgtctccaggccactgaataacacccaaaagagcaagcagcccctgccatcggcacctgaaaataatcctgaggaggaactggcatcaaaacagaaaaatgaagaatcaaaaaagaggcagtgggctttggaagactttgaaattggtcgccctctgggtaaaggaaagtttggtaatgtttatttggcaagagaaaagcaaagcaagtttattctggctcttaaagtgttatttaaagctcagctggagaaagccggagtggagcatcagctcagaagagaagtagaaatacagtcccaccttcggcatcctaatattcttagactgtatggttatttccatgatgctaccagagtctacctaattctggaatatgcaccacttggaacagtttatagagaacttcagaaactttcaaagtttgatgagcagagaactgctacttatataacagaattggcaaatgccctgtcttactgtcattcgaagagagttattcatagagacattaagccagagaacttacttcttggatcagctggagagcttaaaattgcagattttgggtggtcagtacatgctccatcttccaggaggaccactctctgtggcaccctggactacctgccccctgaaatgattgaaggtcggatgcatgatgagaaggtggatctctggagccttggagttctttgctatgaatttttagttgggaagcctccttttgaggcaaacacataccaagagacctacaaaagaatatcacgggttgaattcacattccctgactttgtaacagagggagccagggacctcatttcaagactgttgaagcataatcccagccagaggccaatgctcagagaagtacttgaacacccctggatcacagcaaattcatcaaaaccatcaaattgccaaaacaaagaatcagctagcaaacagtcttaggaatcgtgcagggggagaaatccttgagccagggctgccatataacctgacaggaacatgctactgaagtttattttaccattgactgctgccctcaatctagaacgctacacaagaaatatttgttttactcagcaggtgtgccttaacctccctattcagaaagctccacatcaataaacatgacactctgaagtgaaagtagccacgagaattgtgctacttatactggttcataatctggaggcaaggttcgactgcagccgccccgtcagcctgtgctaggcatggtgtcttcacaggaggcaaatccagagcctggctgtggggaaagtgaccactctgccctgaccccgatcagttaaggagctgtgcaataaccttcctagtacctgagtgagtgtgtaacttattgggttggcgaagcctggtaaagctgttggaatgagtatgtgattctttttaagtatgaaaataaagatatatgtacagacttgtattttttctctggtggcattcctttaggaatgctgtgtgtctgtccggcaccccggtaggcctgattgggtttctagtcctccttaaccacttatctcccatatgagagtgtgaaaaataggaacacgtgctctacctccatttagggatttgcttgggatacagaagaggccatgtgtctcagagctgttaagggcttatttttttaaaacattggagtcatagcatgtgtgtaaactttaaatatgcaaataaataagtatctatgtctaaaaaaa

SEQ ID NO: 89 - DNA, 25 bp, Artificial sequence
  CHI3L1 probe
tcaccaatgccatcaaggatgcact

SEQ ID NO: 90 - DNA, 25 bp, Artificial sequence
  CHI3L1 probe
caaggatgcactcgctgcaacgtag

SEQ ID NO: 91 - DNA, 25 bp, Artificial sequence
  CHI3L1 probe
cacacagcacgggggccaaggatgc

SEQ ID NO: 92 - DNA, 25 bp, Artificial sequence
  CHI3L1 probe
tgcagaggtccacaacacacagatt

SEQ ID NO: 93 - DNA, 25 bp, Artificial sequence
  CHI3L1 probe
cacagatttgagctcagccctggtg

SEQ ID NO: 94 - DNA, 25 bp, Artificial sequence
  CHI3L1 probe
ccctagccctccttatcaaaggaca

SEQ ID NO: 95 - DNA, 25 bp, Artificial sequence
  CHI3L1 probe
aaggacaccattttggcaagctcta

SEQ ID NO: 96 - DNA, 25 bp, Artificial sequence
  CHI3L1 probe
ggcaagctctatcaccaaggagcca

SEQ ID NO: 97 - DNA, 25 bp, Artificial sequence
  CHI3L1 probe
atcctacaagacacagtgaccatac

SEQ ID NO: 98 - DNA, 25 bp, Artificial sequence
  CHI3L1 probe
agtgaccatactaattataccccct

SEQ ID NO: 99 - DNA, 25 bp, Artificial sequence
  CHI3L1 probe
gcaaagccagcttgaaaccttcact

SEQ ID NO: 100 - DNA, 25 bp, Artificial sequence
  IGFBP2 probe
atccccaactgtgacaagcatggcc

SEQ ID NO: 101 - DNA, 25 bp, Artificial sequence
  IGFBP2 probe
tgacaagcatggcctgtacaacctc

SEQ ID NO: 102 - DNA, 25 bp, Artificial sequence
  IGFBP2 probe
gtacaacctcaaacagtgcaagatg

SEQ ID NO: 103 - DNA, 25 bp, Artificial sequence
  IGFBP2 probe
gcaagatgtctctgaacgggcagcg

SEQ ID NO: 104 - DNA, 25 bp, Artificial sequence
  IGFBP2 probe
acgggcagcgtggggagtgctggtg

SEQ ID NO: 105 - DNA, 25 bp, Artificial sequence
  IGFBP2 probe
gaaccccaacaccgggaagctgatc

SEQ ID NO: 106 - DNA, 25 bp, Artificial sequence
  IGFBP2 probe
caccgggaagctgatccagggagcc

SEQ ID NO: 107 - DNA, 25 bp, Artificial sequence
  IGFBP2 probe
catccggggggaccccgagtgtcat

SEQ ID NO: 108 - DNA, 25 bp, Artificial sequence
  IGFBP2 probe
gagtgtcatctcttctacaatgagc

SEQ ID NO: 109 - DNA, 25 bp, Artificial sequence
  IGFBP2 probe
gcacacccagcggatgcagtagacc

SEQ ID NO: 110 - DNA, 25 bp, Artificial sequence
  IGFBP2 probe
gaaaacggagagtgcttgggtggtg

SEQ ID NO: 111 - DNA, 25 bp, Artificial sequence
  POSTN probe
aaattgtggagttagcctcctgtgg

SEQ ID NO: 112 - DNA, 25 bp, Artificial sequence
  POSTN probe
gtggagttagcctcctgtggtaaag

SEQ ID NO: 113 - DNA, 25 bp, Artificial sequence
  POSTN probe
ttacaccctttttcatcttgacatt

SEQ ID NO: 114 - DNA, 25 bp, Artificial sequence
  POSTN probe
gttctggctaactttggaatccatt

SEQ ID NO: 115 - DNA, 25 bp, Artificial sequence
  POSTN probe
agagttgtgaactgttatcccattg

SEQ ID NO: 116 - DNA, 25 bp, Artificial sequence
  POSTN probe
ttatcccattgaaaagaccgagcct

SEQ ID NO: 117 - DNA, 25 bp, Artificial sequence
  POSTN probe
gaccgagccttgtatgtatgttatg

SEQ ID NO: 118 - DNA, 25 bp, Artificial sequence
  POSTN probe
aaatgcacgcaagccattatctctc

SEQ ID NO: 119 - DNA, 25 bp, Artificial sequence
  POSTN probe
agccattatctctccatgggaagct

SEQ ID NO: 120 - DNA, 25 bp, Artificial sequence
  POSTN probe
aggctttgcacatttctatatgagt

SEQ ID NO: 121 - DNA, 25 bp, Artificial sequence
  POSTN probe
gtttgtcatatgcttcttgcaatgc

SEQ ID NO: 122 - DNA, 25 bp, Artificial sequence
  HSPG2 probe
tccctccctcaggggctgtaaggga

SEQ ID NO: 123 - DNA, 25 bp, Artificial sequence
  HSPG2 probe
tcaggggctgtaagggaaggcccac

SEQ ID NO: 124 - DNA, 25 bp, Artificial sequence
  HSPG2 probe
actcctccaacagacaacggacgga

SEQ ID NO: 125 - DNA, 25 bp, Artificial sequence
  HSPG2 probe
gacaacggacggacggatgccgctg

SEQ ID NO: 126 - DNA, 25 bp, Artificial sequence
  HSPG2 probe
atgccgctggtgctcaggaagagct

SEQ ID NO: 127 - DNA, 25 bp, Artificial sequence
  HSPG2 probe
gctcaggaagagctagtgccttagg

SEQ ID NO: 128 - DNA, 25 bp, Artificial sequence
  HSPG2 probe
ggaagagctagtgccttaggtgggg

SEQ ID NO: 129 - DNA, 25 bp, Artificial sequence
  HSPG2 probe
agagctagtgccttaggtgggggaa

SEQ ID NO: 130 - DNA, 25 bp, Artificial sequence
  HSPG2 probe
ggaaggcaggactcacgactgagag

SEQ ID NO: 131 - DNA, 25 bp, Artificial sequence
  HSPG2 probe
ggcaggactcacgactgagagagag

SEQ ID NO: 132 - DNA, 25 bp, Artificial sequence
  HSPG2 probe
gcccccagactgtggggttgggacg

SEQ ID NO: 133 - DNA, 25 bp, Artificial sequence
  BMP2 probe
tatcgggtttgtacataattttcca

SEQ ID NO: 134 - DNA, 25 bp, Artificial sequence
  BMP2 probe
aattgtagttgttttcagttgtgtg

SEQ ID NO: 135 - DNA, 25 bp, Artificial sequence
  BMP2 probe
ggaaggttactctggcaaagtgctt

SEQ ID NO: 136 - DNA, 25 bp, Artificial sequence
  BMP2 probe
gtttgcttttttgcagtgctactgt

SEQ ID NO: 137 - DNA, 25 bp, Artificial sequence
  BMP2 probe
gtgctactgttgagttcacaagttc

SEQ ID NO: 138 - DNA, 25 bp, Artificial sequence
  BMP2 probe
gtggataatccactctgctgacttt

SEQ ID NO: 139 - DNA, 25 bp, Artificial sequence
  BMP2 probe
agaaccagacattgctgatctatta

SEQ ID NO: 140 - DNA, 25 bp, Artificial sequence
  BMP2 probe
ctattatagaaactctcctcctgcc

SEQ ID NO: 141 - DNA, 25 bp, Artificial sequence
  BMP2 probe
tcctcctgccccttaatttacagaa

SEQ ID NO: 142 - DNA, 25 bp, Artificial sequence
  BMP2 probe
tttcctaaattagtgatcccttcaa

SEQ ID NO: 143 - DNA, 25 bp, Artificial sequence
  BMP2 probe
ggggctgatctggccaaagtattca

SEQ ID NO: 144 - DNA, 25 bp, Artificial sequence
  COL1A1 probe
tgggagacaatttcacatggacttt

SEQ ID NO: 145 - DNA, 25 bp, Artificial sequence
  COL1A1 probe
gagacaatttcacatggactttgga

SEQ ID NO: 146 - DNA, 25 bp, Artificial sequence
  COL1A1 probe
acaatttcacatggactttggaaaa

SEQ ID NO: 147 - DNA, 25 bp, Artificial sequence
  COL1A1 probe
ttcctttgcattcatctctcaaact

SEQ ID NO: 148 - DNA, 25 bp, Artificial sequence
  COL1A1 probe
tcctttgcattcatctctcaaactt

SEQ ID NO: 149 - DNA, 25 bp, Artificial sequence
  COL1A1 probe
tttgcattcatctctcaaacttagt

SEQ ID NO: 150 - DNA, 25 bp, Artificial sequence
  COL1A1 probe
tgcattcatctctcaaacttagttt

SEQ ID NO: 151 - DNA, 25 bp, Artificial sequence
  COL1A1 probe
cattcatctctcaaacttagttttt

SEQ ID NO: 152 - DNA, 25 bp, Artificial sequence
  COL1A1 probe
atctctcaaacttagtttttatctt

SEQ ID NO: 153 - DNA, 25 bp, Artificial sequence
  COL1A1 probe
tttttatctttgaccaaccgaacat

SEQ ID NO: 154 - DNA, 25 bp, Artificial sequence
  COL1A1 probe
tttatctttgaccaaccgaacatga

SEQ ID NO: 155 - DNA, 25 bp, Artificial sequence
  NEK2 probe
gctgtagtgttgaatacttggcccc

SEQ ID NO: 156 - DNA, 25 bp, Artificial sequence
  NEK2 probe
tgaatacttggccccatgagccatg

SEQ ID NO: 157 - DNA, 25 bp, Artificial sequence
  NEK2 probe
gccatgcctttctgtatagtacaca

SEQ ID NO: 158 - DNA, 25 bp, Artificial sequence
  NEK2 probe
gatatttcggaattggttttactgt

SEQ ID NO: 159 - DNA, 25 bp, Artificial sequence
  NEK2 probe
ttggttgggcttttaatcctgtgtg

SEQ ID NO: 160 - DNA, 25 bp, Artificial sequence
  NEK2 probe
gtagcactcactgaatagttttaaa

SEQ ID NO: 161 - DNA, 25 bp, Artificial sequence
  NEK2 probe
ggtatgcttacaattgtcatgtcta

SEQ ID NO: 162 - DNA, 25 bp, Artificial sequence
  NEK2 probe
attaataccatgacatcttgcttat

SEQ ID NO: 163 - DNA, 25 bp, Artificial sequence
  NEK2 probe
aaatattccattgctctgtagttca

SEQ ID NO: 164 - DNA, 25 bp, Artificial sequence
  NEK2 probe
ctctgtagttcaaatctgttagctt

SEQ ID NO: 165 - DNA, 25 bp, Artificial sequence
  NEK2 probe
tgagctgtctgtcatttacctactt

SEQ ID NO: 166 - DNA, 25 bp, Artificial sequence
  DLG7 probe
gtgagagaatgagtttgcctcttct

SEQ ID NO: 167 - DNA, 25 bp, Artificial sequence
  DLG7 probe
ggatgttttgatgagtagccctgaa

SEQ ID NO: 168 - DNA, 25 bp, Artificial sequence
  DLG7 probe
aaagtctcactactgaatgccacct

SEQ ID NO: 169 - DNA, 25 bp, Artificial sequence
  DLG7 probe
ccaccttcttgattcaccaggtcta

SEQ ID NO: 170 - DNA, 25 bp, Artificial sequence
  DLG7 probe
gcagtaatccatttactcagctgga

SEQ ID NO: 171 - DNA, 25 bp, Artificial sequence
  DLG7 probe
gagacatcaagaacatgccagacac

SEQ ID NO: 172 - DNA, 25 bp, Artificial sequence
  DLG7 probe
atgccagacacatttcttttggtgg

SEQ ID NO: 173 - DNA, 25 bp, Artificial sequence
  DLG7 probe
tggtaacctgattactttttcacct

SEQ ID NO: 174 - DNA, 25 bp, Artificial sequence
  DLG7 probe
actttttcacctctacaaccaggag

SEQ ID NO: 175 - DNA, 25 bp, Artificial sequence
  DLG7 probe
atttgtgttcacttctatagcatat

SEQ ID NO: 176 - DNA, 25 bp, Artificial sequence
  DLG7 probe
gatatactctttctcaagggaagtg

SEQ ID NO: 177 - DNA, 25 bp, Artificial sequence
  FOXM1 probe
agctgacttggaaacacggggaggt

SEQ ID NO: 178 - DNA, 25 bp, Artificial sequence
  FOXM1 probe
caagcagatccacttgtctgggtcc

SEQ ID NO: 179 - DNA, 25 bp, Artificial sequence
  FOXM1 probe
gtctgggtccctgcagtgaagaacc

SEQ ID NO: 180 - DNA, 25 bp, Artificial sequence
  FOXM1 probe
agaacccaagatccaggtacctcag

SEQ ID NO: 181 - DNA, 25 bp, Artificial sequence
  FOXM1 probe
agaaaccgtgcactgcaggtcttcc

SEQ ID NO: 182 - DNA, 25 bp, Artificial sequence
  FOXM1 probe
atttcttcctccttgatagtctgaa

SEQ ID NO: 183 - DNA, 25 bp, Artificial sequence
  FOXM1 probe
agaaagaggagctatcccctcctca

SEQ ID NO: 184 - DNA, 25 bp, Artificial sequence
  FOXM1 probe
ctcctcagctagcagcacctgaaag

SEQ ID NO: 185 - DNA, 25 bp, Artificial sequence
  FOXM1 probe
gaaccaacggtcaccagacaggacg

SEQ ID NO: 186 - DNA, 25 bp, Artificial sequence
  FOXM1 probe
acatacgggttctgatcctctttgt

SEQ ID NO: 187 - DNA, 25 bp, Artificial sequence
  FOXM1 probe
gatcctctttgtgtcgttttgaagt

SEQ ID NO: 188 - DNA, 25 bp, Artificial sequence
  BIRC5 probe
gctcctctactgtttaacaacatgg

SEQ ID NO: 189 - DNA, 25 bp, Artificial sequence
  BIRC5 probe
aagcacaaagccattctaagtcatt

SEQ ID NO: 190 - DNA, 25 bp, Artificial sequence
  BIRC5 probe
ggaagcgtctggcagatactccttt

SEQ ID NO: 191 - DNA, 25 bp, Artificial sequence
  BIRC5 probe
tggcagatactccttttgccactgc

SEQ ID NO: 192 - DNA, 25 bp, Artificial sequence
  BIRC5 probe
tgattagacaggcccagtgagccgc

SEQ ID NO: 193 - DNA, 25 bp, Artificial sequence
  BIRC5 probe
aatgacttggctcgatgctgtgggg

SEQ ID NO: 194 - DNA, 25 bp, Artificial sequence
  BIRC5 probe
tcacgttctccacacgggggagaga

SEQ ID NO: 195 - DNA, 25 bp, Artificial sequence
  BIRC5 probe
tcccgcagggctgaagtctggcgta

SEQ ID NO: 196 - DNA, 25 bp, Artificial sequence
  BIRC5 probe
gatgatggatttgattcgccctcct

SEQ ID NO: 197 - DNA, 25 bp, Artificial sequence
  BIRC5 probe
tacagcttcgctggaaacctctgga

SEQ ID NO: 198 - DNA, 25 bp, Artificial sequence
  BIRC5 probe
ggaaacctctggaggtcatctcggc

SEQ ID NO: 199 - DNA, 25 bp, Artificial sequence
  PLK1 probe
tgggttatgcccaacatctgctttc

SEQ ID NO: 200 - DNA, 25 bp, Artificial sequence
  PLK1 probe
tgagcagctcccaatgagaaccctg

SEQ ID NO: 201 - DNA, 25 bp, Artificial sequence
  PLK1 probe
gagaaccctgaacactgagtctgta

SEQ ID NO: 202 - DNA, 25 bp, Artificial sequence
  PLK1 probe
agtctgtaatgagcttcccttgtat

SEQ ID NO: 203 - DNA, 25 bp, Artificial sequence
  PLK1 probe
gagcttcccttgtatacaacattgc

SEQ ID NO: 204 - DNA, 25 bp, Artificial sequence
  PLK1 probe
caacattgcacatgggttgtcacaa

SEQ ID NO: 205 - DNA, 25 bp, Artificial sequence
  PLK1 probe
gtcacaactgattgctggaggaatt

SEQ ID NO: 206 - DNA, 25 bp, Artificial sequence
  PLK1 probe
aattgtgtcctatgtgactctgctg

SEQ ID NO: 207 - DNA, 25 bp, Artificial sequence
  PLK1 probe
actgtgggaggcttacacctggttt

SEQ ID NO: 208 - DNA, 25 bp, Artificial sequence
  PLK1 probe
tggactttgtccatgcgcttttttc

SEQ ID NO: 209 - DNA, 25 bp, Artificial sequence
  PLK1 probe
ttgctgattttgcttcctagccttt

SEQ ID NO: 210 - DNA, 25 bp, Artificial sequence
  NKX6m1 probe
tctggcccggagtgatgcagagccc

SEQ ID NO: 211 - DNA, 25 bp, Artificial sequence
  NKX6m1 probe
gtacccctcatcaaggatccatttt

SEQ ID NO: 212 - DNA, 25 bp, Artificial sequence
  NKX6m1 probe
agagaaaacacacgagacccacttt

SEQ ID NO: 213 - DNA, 25 bp, Artificial sequence
  NKX6m1 probe
tttttccggacagcagatcttcgcc

SEQ ID NO: 214 - DNA, 25 bp, Artificial sequence
  NKX6m1 probe
tacttggcggggcccgagagggctc

SEQ ID NO: 215 - DNA, 25 bp, Artificial sequence
  NKX6m1 probe
ctcgtttggcctattcgttggggat

SEQ ID NO: 216 - DNA, 25 bp, Artificial sequence
  NKX6m1 probe
gagtcaggtcaaggtctggttccag

SEQ ID NO: 217 - DNA, 25 bp, Artificial sequence
  NKX6m1 probe
gaagcaggactcggagacagagcgc

SEQ ID NO: 218 - DNA, 25 bp, Artificial sequence
  NKX6m1 probe
gactacaataagcctctggatccca

SEQ ID NO: 219 - DNA, 25 bp, Artificial sequence
  NKX6m1 probe
gaagaagcacaagtccagcagcggc

SEQ ID NO: 220 - DNA, 25 bp, Artificial sequence
  NKX6m1 probe
tccgagccggagagctcatcctgaa

SEQ ID NO: 221 - DNA, 25 bp, Artificial sequence
  NRG3probe
catgtgttcattgtgcgtatgtgtg

SEQ ID NO: 222 - DNA, 25 bp, Artificial sequence
  NRG3probe
gtgcatgtgtgcgcgtattacgctt

SEQ ID NO: 223 - DNA, 25 bp, Artificial sequence
  NRG3probe
ttacgcttgctaaaatttgttctga

SEQ ID NO: 224 - DNA, 25 bp, Artificial sequence
  NRG3probe
aggtcacttgcatggtggggtcgta

SEQ ID NO: 225 - DNA, 25 bp, Artificial sequence
  NRG3probe
ggtcgtataaaacccttgacactgt

SEQ ID NO: 226 - DNA, 25 bp, Artificial sequence
  NRG3probe
gacactgtctagaccattttctgat

SEQ ID NO: 227 - DNA, 25 bp, Artificial sequence
  NRG3probe
gagaggatcaactattggctcatta

SEQ ID NO: 228 - DNA, 25 bp, Artificial sequence
  NRG3probe
tagcaagtctgctatgtgtggacca

SEQ ID NO: 229 - DNA, 25 bp, Artificial sequence
  NRG3 probe
gcttcggcttctgtggttagtatgg

SEQ ID NO: 230 - DNA, 25 bp, Artificial sequence
  NRG3 probe
aatacccagactattcagttcacaa

SEQ ID NO: 231 - DNA, 25 bp, Artificial sequence
  NRG3 probe
ctattcagttcacaagaagcccccc

SEQ ID NO: 232 - DNA, 25 bp, Artificial sequence
  BUB1B probe
ttctttgtgcggattctgaatgcca

SEQ ID NO: 233 - DNA, 25 bp, Artificial sequence
  BUB1B probe
tggggtttttgacactacattccaa

SEQ ID NO: 234 - DNA, 25 bp, Artificial sequence
  BUB1B probe
gttaactagtcctggggctttgctc

SEQ ID NO: 235 - DNA, 25 bp, Artificial sequence
  BUB1B probe
ggggctttgctctttcagtgagcta

SEQ ID NO: 236 - DNA, 25 bp, Artificial sequence
  BUB1B probe
gagctaggcaatcaagtctcacaga

SEQ ID NO: 237 - DNA, 25 bp, Artificial sequence
  BUB1B probe
gtctcacagattgctgcctcagagc

SEQ ID NO: 238 - DNA, 25 bp, Artificial sequence
  BUB1B probe
ggacacatttagatgcactaccatt

SEQ ID NO: 239 - DNA, 25 bp, Artificial sequence
  BUB1B probe
cactaccattgctgttctacttttt

SEQ ID NO: 240 - DNA, 25 bp, Artificial sequence
  BUB1B probe
ggtacaggtatattttgacgtcact

SEQ ID NO: 241 - DNA, 25 bp, Artificial sequence
  BUB1B probe
ggccttgtctaacttttgtgaagaa

SEQ ID NO: 242 - DNA, 25 bp, Artificial sequence
  BUB1B probe
gttctcttatgatcaccatgtattt

SEQ ID NO: 243 - DNA, 25 bp, Artificial sequence
  VIM probe
tgtggatgtttccaagcctgacctc

SEQ ID NO: 244 - DNA, 25 bp, Artificial sequence
  VIM probe
tgccctgcgtgacgtacgtcagcaa

SEQ ID NO: 245 - DNA, 25 bp, Artificial sequence
  VIM probe
gtgtggctgccaagaacctgcagga

SEQ ID NO: 246 - DNA, 25 bp, Artificial sequence
  VIM probe
agtaccggagacaggtgcagtccct

SEQ ID NO: 247 - DNA, 25 bp, Artificial sequence
  VIM probe
gcagtccctcacctgtgaagtggat

SEQ ID NO: 248 - DNA, 25 bp, Artificial sequence
  VIM probe
tgagtccctggaacgccagatgcgt

SEQ ID NO: 249 - DNA, 25 bp, Artificial sequence
  VIM probe
gagaactttgccgttgaagctgcta

SEQ ID NO: 250 - DNA, 25 bp, Artificial sequence
  VIM probe
gaagctgctaactaccaagacacta

SEQ ID NO: 251 - DNA, 25 bp, Artificial sequence
  VIM probe
cactattggccgcctgcaggatgag

SEQ ID NO: 252 - DNA, 25 bp, Artificial sequence
  VIM probe
gtcaccttcgtgaataccaagacct

SEQ ID NO: 253 - DNA, 25 bp, Artificial sequence
  VIM probe
gcccttgacattgagattgccacct

SEQ ID NO: 254 - DNA, 25 bp, Artificial sequence
  TNC probe
ttttaccaaagcatcaatacaacca

SEQ ID NO: 255 - DNA, 25 bp, Artificial sequence
  TNC probe
cggtccacacctgggcatttggtga

SEQ ID NO: 256 - DNA, 25 bp, Artificial sequence
  TNC probe
tcaaagctgaccatggatccctggg

SEQ ID NO: 257 - DNA, 25 bp, Artificial sequence
  TNC probe
ttgcaccaaagacatcagtctccaa

SEQ ID NO: 258 - DNA, 25 bp, Artificial sequence
  TNC probe
catcagtctccaacatgtttctgtt

SEQ ID NO: 259 - DNA, 25 bp, Artificial sequence
  TNC probe
atcgcaatagttttttacttctctt

SEQ ID NO: 260 - DNA, 25 bp, Artificial sequence
  TNC probe
ttacttctcttaggtggctctggga

SEQ ID NO: 261 - DNA, 25 bp, Artificial sequence
  TNC probe
gaaccagccgtattttacatgaagc

SEQ ID NO: 262 - DNA, 25 bp, Artificial sequence
  TNC probe
atgtgtcattggaagccatcccttt

SEQ ID NO: 263 - DNA, 25 bp, Artificial sequence
  TNC probe
tcaagagatctttctttccaaaaca

SEQ ID NO: 264 - DNA, 25 bp, Artificial sequence
  TNC probe
acatttctggacagtacctgattgt

SEQ ID NO: 265 - DNA, 25 bp, Artificial sequence
  DLL3 probe
tcccggctacatgggagcgcggtgt

SEQ ID NO: 266 - DNA, 25 bp, Artificial sequence
  DLL3 probe
tggccactcccaggatgctgggtct

SEQ ID NO: 267 - DNA, 25 bp, Artificial sequence
  DLL3 probe
gatgcactcaacaacctaaggacgc

SEQ ID NO: 268 - DNA, 25 bp, Artificial sequence
  DLL3 probe
gacgcaggagggttccggggatggt

SEQ ID NO: 269 - DNA, 25 bp, Artificial sequence
  DLL3 probe
gtccgagctcgtccgtagattggaa

SEQ ID NO: 270 - DNA, 25 bp, Artificial sequence
  DLL3 probe
aatcgccctgaagatgtagaccctc

SEQ ID NO: 271 - DNA, 25 bp, Artificial sequence
  DLL3 probe
ggatttatgtcatatctgctccttc

SEQ ID NO: 272 - DNA, 25 bp, Artificial sequence
  DLL3 probe
cttccatctacgctcgggaggtagc

SEQ ID NO: 273 - DNA, 25 bp, Artificial sequence
  DLL3 probe
cttcctcgattctgtccgtgaaatg

SEQ ID NO: 274 - DNA, 25 bp, Artificial sequence
  DLL3 probe
tttaagcccattttcagttctaact

SEQ ID NO: 275 - DNA, 25 bp, Artificial sequence
  DLL3 probe
ttactttcatcctattttgcatccc

SEQ ID NO: 276 - DNA, 25 bp, Artificial sequence
  JAG1 probe
tttgtttttctgctttagacttgaa

SEQ ID NO: 277 - DNA, 25 bp, Artificial sequence
  JAG1 probe
gagacaggcaggtgatctgctgcag

SEQ ID NO: 278 - DNA, 25 bp, Artificial sequence
  JAG1 probe
ggaagcacaccaatctgactttgta

SEQ ID NO: 279 - DNA, 25 bp, Artificial sequence
  JAG1 probe
gatttcttttcaccattcgtacata

SEQ ID NO: 280 - DNA, 25 bp, Artificial sequence
  JAG1 probe
gaaccacttgtagatttgatttttt

SEQ ID NO: 281 - DNA, 25 bp, Artificial sequence
  JAG1 probe
agatcactgtttagatttgccatag

SEQ ID NO: 282 - DNA, 25 bp, Artificial sequence
  JAG1 probe
tttgccatagagtacactgcctgcc

SEQ ID NO: 283 - DNA, 25 bp, Artificial sequence
  JAG1 probe
gtacactgcctgccttaagtgagga

SEQ ID NO: 284 - DNA, 25 bp, Artificial sequence
  JAG1 probe
agagtaatcttgttggttcaccatt

SEQ ID NO: 285 - DNA, 25 bp, Artificial sequence
  JAG1 probe
gatactttgtattgtcctattagtg

SEQ ID NO: 286 - DNA, 25 bp, Artificial sequence
  JAG1 probe
gcatctttgatgtgttgttcttggc

SEQ ID NO: 287 - DNA, 25 bp, Artificial sequence
  KI67 probe
aaactggctcctaatctccagcttt

SEQ ID NO: 288 - DNA, 25 bp, Artificial sequence
  KI67 probe
agcttcggaagtttactggctctgc

SEQ ID NO: 289 - DNA, 25 bp, Artificial sequence
  KI67 probe
ttctttctgactctatctggcagcc

SEQ ID NO: 290 - DNA, 25 bp, Artificial sequence
  KI67 probe
gtactctgtaaagcatcatcatcct

SEQ ID NO: 291 - DNA, 25 bp, Artificial sequence
  KI67 probe
gagagactgagcactcagcaccttc

SEQ ID NO: 292 - DNA, 25 bp, Artificial sequence
  KI67 probe
tttcaggatcgcttccttgtgagcc

SEQ ID NO: 293 - DNA, 25 bp, Artificial sequence
  KI67 probe
tctttctccagcttcagacttgtag

SEQ ID NO: 294 - DNA, 25 bp, Artificial sequence
  KI67 probe
aactcgttcatcttcatttactttc

SEQ ID NO: 295 - DNA, 25 bp, Artificial sequence
  KI67 probe
caaatcagagaatagcccgccatcc

SEQ ID NO: 296 - DNA, 25 bp, Artificial sequence
  KI67 probe
cacccaccttgccaggtgcaggtga

SEQ ID NO: 297 - DNA, 25 bp, Artificial sequence
  KI67 probe
gtttccccagtgtctggcggggagc

SEQ ID NO: 298 - DNA, 25 bp, Artificial sequence
  EZH2 probe
aaattcgttttgcaaatcattcggt

SEQ ID NO: 299 - DNA, 25 bp, Artificial sequence
  EZH2 probe
aaatcattcggtaaatccaaactgc

SEQ ID NO: 300 - DNA, 25 bp, Artificial sequence
  EZH2 probe
gatcacaggataggtatttttgcca

SEQ ID NO: 301 - DNA, 25 bp, Artificial sequence
  EZH2 probe
ttttgccaagagagccatccagact

SEQ ID NO: 302 - DNA, 25 bp, Artificial sequence
  EZH2 probe
ccatccagactggcgaagagctgtt

SEQ ID NO: 303 - DNA, 25 bp, Artificial sequence
  EZH2 probe
gaaacagctgccttagcttcaggaa

SEQ ID NO: 304 - DNA, 25 bp, Artificial sequence
  EZH2 probe
ctgccttagcttcaggaacctcgag

SEQ ID NO: 305 - DNA, 25 bp, Artificial sequence
  EZH2 probe
tcaggaacctcgagtactgtgggca

SEQ ID NO: 306 - DNA, 25 bp, Artificial sequence
  EZH2 probe
gccttctcaccagctgcaaagtgtt

SEQ ID NO: 307 - DNA, 25 bp, Artificial sequence
  EZH2 probe
caaagtgttttgtaccagtgaattt

SEQ ID NO: 308 - DNA, 25 bp, Artificial sequence
  EZH2 probe
gcagtatggtacatttttcaacttt

SEQ ID NO: 309 - DNA, 25 bp, Artificial sequence
  BUB1 probe
gaagatgatttatctgctggcttgg

SEQ ID NO: 310 - DNA, 25 bp, Artificial sequence
  BUB1 probe
tgctggcttggcactgattgacctg

SEQ ID NO: 311 - DNA, 25 bp, Artificial sequence
  BUB1 probe
gatgctcagcaacaaaccatggaac

SEQ ID NO: 312 - DNA, 25 bp, Artificial sequence
  BUB1 probe
gaactaccagatcgattactttggg

SEQ ID NO: 313 - DNA, 25 bp, Artificial sequence
  BUB1 probe
attactttggggttgctgcaacagt

SEQ ID NO: 314 - DNA, 25 bp, Artificial sequence
  BUB1 probe
catgctctttggcacttacatgaaa

SEQ ID NO: 315 - DNA, 25 bp, Artificial sequence
  BUB1 probe
gagagtgtaagcctgaaggtctttt

SEQ ID NO: 316 - DNA, 25 bp, Artificial sequence
  BUB1 probe
ttagaaggcttcctcatttggatat

SEQ ID NO: 317 - DNA, 25 bp, Artificial sequence
  BUB1 probe
aatattccagattgtcatcatcttc

SEQ ID NO: 318 - DNA, 25 bp, Artificial sequence
  BUB1 probe
gattagggccctacgtaataggcta

SEQ ID NO: 319 - DNA, 25 bp, Artificial sequence
  BUB1 probe
taataggctaattgtactgctctta

SEQ ID NO: 320 - DNA, 25 bp, Artificial sequence
  AURKA probe
ccctcaatctagaacgctacacaag

SEQ ID NO: 321 - DNA, 25 bp, Artificial sequence
  AURKA probe
aaataggaacacgtgctctacctcc

SEQ ID NO: 322 - DNA, 25 bp, Artificial sequence
  AURKA probe
gtgctctacctccatttagggattt

SEQ ID NO: 323 - DNA, 25 bp, Artificial sequence
  AURKA probe
ctacctccatttagggatttgcttg

SEQ ID NO: 324 - DNA, 25 bp, Artificial sequence
  AURKA probe
ttagggatttgcttgggatacagaa

SEQ ID NO: 325 - DNA, 25 bp, Artificial sequence
  AURKA probe
gggatacagaagaggccatgtgtct

SEQ ID NO: 326 - DNA, 25 bp, Artificial sequence
  AURKA probe
gaagaggccatgtgtctcagagctg

SEQ ID NO: 327 - DNA, 25 bp, Artificial sequence
  AURKA probe
gaggccatgtgtctcagagctgtta

SEQ ID NO: 328 - DNA, 25 bp, Artificial sequence
  AURKA probe
gtgtctcagagctgttaagggctta

SEQ ID NO: 329 - DNA, 25 bp, Artificial sequence
  AURKA probe
cagagctgttaagggcttatttttt

SEQ ID NO: 330 - DNA, 25 bp, Artificial sequence
  AURKA probe
cattggagtcatagcatgtgtgtaa
